United States Patent Application Publication US 2022/0211063 A1 - sequence listing, part 45

SEQ ID NO: 151 - DNA, 8605834 bp, Penicillium roqueforti (residues 3,442,335-5,163,501 of 8,605,834)
  misc_feature (89143)..(89590): n is a, c, g, or t
  misc_feature (91422)..(91652): n is a, c, g, or t
  misc_feature (329880)..(330016): n is a, c, g, or t
  misc_feature (430767)..(431098): n is a, c, g, or t
  misc_feature (461650)..(461666): n is a, c, g, or t
  misc_feature (496409)..(496588): n is a, c, g, or t
  misc_feature (532012)..(532106): n is a, c, g, or t
  misc_feature (539762)..(539897): n is a, c, g, or t
  misc_feature (569546)..(569750): n is a, c, g, or t
  misc_feature (649063)..(649199): n is a, c, g, or t
  misc_feature (691124)..(691186): n is a, c, g, or t
  misc_feature (866509)..(866673): n is a, c, g, or t
  misc_feature (1032465)..(1091864): n is a, c, g, or t
  misc_feature (1092551)..(1092762): n is a, c, g, or t
  misc_feature (1210222)..(1210434): n is a, c, g, or t
  misc_feature (1240580)..(1246852): n is a, c, g, or t
  misc_feature (1247779)..(1253711): n is a, c, g, or t
  misc_feature (1258330)..(1372329): n is a, c, g, or t
  misc_feature (1374163)..(1374571): n is a, c, g, or t
  misc_feature (1457570)..(1457856): n is a, c, g, or t
  misc_feature (1505383)..(1505555): n is a, c, g, or t
  misc_feature (1513254)..(1513416): n is a, c, g, or t
  misc_feature (1624076)..(1624277): n is a, c, g, or t
  misc_feature (1669186)..(1669391): n is a, c, g, or t
  misc_feature (1761254)..(1761480): n is a, c, g, or t
  misc_feature (1817801)..(1926100): n is a, c, g, or t
  misc_feature (1933201)..(1933451): n is a, c, g, or t
  misc_feature (1964013)..(1964390): n is a, c, g, or t
  misc_feature (2150548)..(2150646): n is a, c, g, or t
  misc_feature (2196778)..(2196986): n is a, c, g, or t
  misc_feature (2250772)..(2250828): n is a, c, g, or t
  misc_feature (2391584)..(2391875): n is a, c, g, or t
  misc_feature (2493614)..(2493845): n is a, c, g, or t
  misc_feature (2532220)..(2532497): n is a, c, g, or t
  misc_feature (2536366)..(2536607): n is a, c, g, or t
  misc_feature (2786762)..(2787018): n is a, c, g, or t
  misc_feature (2859720)..(2860011): n is a, c, g, or t
  misc_feature (2874131)..(2875235): n is a, c, g, or t
  misc_feature (2881752)..(2882057): n is a, c, g, or t
  misc_feature (2897306)..(2897484): n is a, c, g, or t
  misc_feature (3050874)..(3051598): n is a, c, g, or t
  misc_feature (3057389)..(3057640): n is a, c, g, or t
  misc_feature (3069739)..(3070114): n is a, c, g, or t
  misc_feature (3075970)..(3076344): n is a, c, g, or t
  misc_feature (3305361)..(3305458): n is a, c, g, or t
  misc_feature (3318647)..(3318971): n is a, c, g, or t
  misc_feature (3502937)..(3503051): n is a, c, g, or t
  misc_feature (3538222)..(3538805): n is a, c, g, or t
  misc_feature (3783649)..(3783863): n is a, c, g, or t
  misc_feature (3992502)..(3992620): n is a, c, g, or t
  misc_feature (4005402)..(4005665): n is a, c, g, or t
  misc_feature (4027592)..(4027792): n is a, c, g, or t
  misc_feature (4058717)..(4058863): n is a, c, g, or t
  misc_feature (4267467)..(4267504): n is a, c, g, or t
  misc_feature (4352970)..(4353432): n is a, c, g, or t
  misc_feature (4361969)..(4362121): n is a, c, g, or t
  misc_feature (4393887)..(4394120): n is a, c, g, or t
  misc_feature (4451619)..(4451756): n is a, c, g, or t
  misc_feature (4461648)..(4461894): n is a, c, g, or t
  misc_feature (4481354)..(4481472): n is a, c, g, or t
  misc_feature (4534019)..(4534156): n is a, c, g, or t
  misc_feature (4590279)..(4590507): n is a, c, g, or t
  misc_feature (4669101)..(4669433): n is a, c, g, or t
  misc_feature (4737275)..(4737369): n is a, c, g, or t
  misc_feature (4766897)..(4767094): n is a, c, g, or t
  misc_feature (4834677)..(4834984): n is a, c, g, or t
  misc_feature (4927667)..(4928240): n is a, c, g, or t
  misc_feature (4945248)..(4945398): n is a, c, g, or t
  misc_feature (5082668)..(5082816): n is a, c, g, or t
  misc_feature (5112709)..(5113430): n is a, c, g, or t
  misc_feature (5314787)..(5314980): n is a, c, g, or t
  misc_feature (5372720)..(5373147): n is a, c, g, or t
  misc_feature (5459101)..(5459212): n is a, c, g, or t
  misc_feature (5480412)..(5480585): n is a, c, g, or t
  misc_feature (5535554)..(5535568): n is a, c, g, or t
  misc_feature (5567702)..(5567841): n is a, c, g, or t
  misc_feature (5598930)..(5599143): n is a, c, g, or t
  misc_feature (5726966)..(5727044): n is a, c, g, or t
  misc_feature (5743477)..(5743945): n is a, c, g, or t
  misc_feature (5807639)..(5807725): n is a, c, g, or t
  misc_feature (5919971)..(5920649): n is a, c, g, or t
  misc_feature (5921963)..(5922269): n is a, c, g, or t
  misc_feature (5942845)..(5943124): n is a, c, g, or t
  misc_feature (6011310)..(6011605): n is a, c, g, or t
  misc_feature (6325131)..(6325449): n is a, c, g, or t
  misc_feature (6397541)..(6397652): n is a, c, g, or t
  misc_feature (6604798)..(6604968): n is a, c, g, or t
  misc_feature (6843737)..(6849488): n is a, c, g, or t
  misc_feature (6859843)..(6860483): n is a, c, g, or t
  misc_feature (6915200)..(6915987): n is a, c, g, or t
  misc_feature (6919291)..(6924161): n is a, c, g, or t
  misc_feature (6950610)..(6950746): n is a, c, g, or t
  misc_feature (7010146)..(7010383): n is a, c, g, or t
  misc_feature (7088736)..(7088959): n is a, c, g, or t
  misc_feature (7281029)..(7281208): n is a, c, g, or t
  misc_feature (7435388)..(7435513): n is a, c, g, or t
  misc_feature (7580067)..(7580387): n is a, c, g, or t
  misc_feature (7598064)..(7598213): n is a, c, g, or t
  misc_feature (7639278)..(7639394): n is a, c, g, or t
  misc_feature (7648488)..(7648695): n is a, c, g, or t
  misc_feature (8007457)..(8007643): n is a, c, g, or t
  misc_feature (8053200)..(8053665): n is a, c, g, or t
  misc_feature (8129339)..(8129754): n is a, c, g, or t
  misc_feature (8134049)..(8134237): n is a, c, g, or t
  misc_feature (8188324)..(8188473): n is a, c, g, or t
  misc_feature (8240007)..(8240478): n is a, c, g, or t
  misc_feature (8245915)..(8246026): n is a, c, g, or t
  misc_feature (8305192)..(8305782): n is a, c, g, or t
  misc_feature (8314148)..(8318265): n is a, c, g, or t
  misc_feature (8345463)..(8345564): n is a, c, g, or t
  misc_feature (8407840)..(8408046): n is a, c, g, or t
  misc_feature (8424732)..(8424857): n is a, c, g, or t
  misc_feature (8481626)..(8481849): n is a, c, g, or t
  misc_feature (8597147)..(8597393): n is a, c, g, or t
ttgccctcctcggtgtagaacttcatggcgaatccgcgagggtcacgggcactgtccggggatcccttctcaccaccgacggtcgagaagcgggtgagcatcttggtcttcttgccgacacccttgagcatatcaatggtcgtctatgcgttattagcctagtattctctggggaagtatagaaactgcctacatacgagatcgctaatgtcatcagtgacctcaaactctccgtaggcgccagcacctttggcgtgaactacccgctcaggaatgcgctcacggtcgaagtgtgccagcagatcgattagatggaaatcctgcatcagaagcgggccgttggggccaatgcgctgggacgcctggggatccatgacctatatgtatatggttagaccttacgattaaagggaaataggcagggcctactgggcagccgttagaggccgtgtagaccggagtctcattgtagcggtaggttcctatgaaagagaggggattagtcaatgttatcggctttgacaaggaatgtaaacctactaggctcgttgtcttgacccatgatcgcagattgtctatggagaagagagaaaagtcccgggagcactttggtttatatagggccttcgggggaaccatggaaaagttcaatgaagcccatagccccaccagcatctgatatgaaatcatcctatcaccaactatattgatataaaacaaacatctaaaatgccaggcctaggtcagacgtgtatgctatatccaatcgtaaacaaggccgatgtcatcctctcgggtccacttcccggaattggagtaaaaaaggacaaggaataggtttgtaagtggatggtggccagaccgagagcaagaaatgccaggaggtcaattgttctcccaatatagcagttcgatccgagctcaagcttgtttgttctgtcggcacgatccgagatcgcgaccccgaagatacgaacttggccttgcagagttgttgagctgcagacaagtcagttaatccgcaattttatatccaacaaattcattggactatctagttatcagagtgtgacagcaaccgaaaattccaagggtcagtcccttcaaggtgttgcgcaaggcagtgcctcgacaaagaaccctggatagtgcttcccttagaattagtgcaaggaataatcaaaagctcccagtagagtcgtgcgtgcacagaggattgaaaacaacaagaaaccaaaaccaaaacaaaaaaagctcgctcaatgcgccaatcatatatcttgtatatcgcagggaaagggaaaacccaaagcaaattgagccctgatcaaatcataagaatgggtgggtatatatagcgcttgcgcttcttgagagcctacggatcaatctatttaaaggggcaccaagagtatgctgcaagtgcatgcatgggaaggaacaaggtttaactggtaggagtgggcgccgaggtgatcgcaggcgagttagtggactcatcccgacatcccgacatctttcccaggctatcacagatcgaggaagagggcgaggcagaagtagcggtagtcgtagctaccgtgctcgttccgtcacggcagccaaaccaccctgggtcatgacagctggtcgttgcagtcaccgagggcaaagtagtagtcaccgtgggtgacggaatggctgttgtggtaggatccttgcacccgaaccagccaggagtcttgcatgtagtagtagtggcagtgcttgtcggtgaagttgttgtcgtagtggtagcggttgtactttcatccagacagccccaccacccgggggtcttgcaagtagaagttctggtgggagatgcggtggtggtggtagtcgtagtagtcgtgacatcggagccgttgcttcggaagaacttccagagttcacagtcaaagcattcttcctctgcgacacatgaagggacattgtcgtatttcaagataacatcagatatcacattctcgatcttgtgggtaccaagaccgacacgccagcccttgtctgccacagtgtcatacgtgcacatttgtccggtgtgacatgctgactccatcgcatagccgccccatgtacaaatagagttgattccattgcaggttcccatatagattgggtctgctgtatgtccaaagtggtaggatccagtgaactctcgcgactgtggaaaccgcgggtcatagcctggcggacttgggaggccaagtcgagctgcgggcaatgcttcaggaacggcctcgaaagtgaccacaggcaatccgaacgtcaatccaaccagactcgtcatggcaccacccagcgaatgaccggtcatccaaatatttgcatctgggtagatctcggtaacgttagagtataaatcgatcgctgcccgataataacggttttcgtcattcatagactcaacgatacatgtcagatttgccgtaaatgtagcactttggcaatcgcaggattgtctccatagatatgagcctccttggccacaacaacaactaaagaataaattatcgttgactttatcgtttgttgtggtgccagcgccatcaaagagagcgggcgaagtgcccttcagagaaatgacaacagtgtcgttcgtcttatcggagtagatgtgccctctcaggccatccgtttgccaaccaaagctccccgaatagttgaatttgccattaatagtgtgccactctcctgttccaggctcctcaatatagtcatttgcagtcatttgtgcaaatgtcaaaacagtctgcttatctgtaatattcggtccaggcaaggtgtccatgacccattccagtggagacaaggcggtcgcaaagcccgaagaccgtgcagctgccaagtgaccttgaatcacctggagtcgccgatcggctaatcgttgtatcgtgagaggacttgatgaggcaagcagagtggaatctgatgcaatatattcttcttcgtggccatcttcggatatagttcgaaggcgagtgtctggcttgacgtcgagtctcgcatgaaagtcgggttgttcataggtgcctcggtgaaagatgtggcgcaaggactataagcgggtatgatggtcagctacagataagaaaacttgagtcaggcatcttacaaactcatgggtgtctggtgtaccctcgtccccattcaaaggtatgacgggaacttgtggagagggtagatgatagcctgaggcggaggcagcacctgacaatactgcagccgcaaataataggctgcggatgctgatttcaaatcgtgaacattttcgagccatgatggggatgctgatgaggatcaaggtcaaggagacgtgagtctatcgcggttatcagcaagtcacttatcaagtgacgaagtgacgcagtgcggagagcgatcggcacgtgatgggtacccccgtgacgtgatgcgatatcgtgtattcctcgtcaatttggtgtcttctcaaatgatcactaggagagtgatacgctgctgttgatcagctgcagtatactccgtgacaagtacggagtactccgtacttccgatcgctttactactggacaacaggctcaggccagagctaggggctctcggacgcggatcgacatcggcctatcagctgcatccgggagcggagacacgcaattagtgccttatagaaccccatcgcccctggtcttaaaatgtctggctctgaaaatagcagtcggcctcatctgaatctagcacggtcattcatcagaatgggcgactcggaagtgaaatctcctacgattgagcaagattccaaaacagcacctccatcgtcacctgtcaataatgaggggcaggaaaatggactcgacgtattcgaaagaccgggctccgcagactccggcacaacaggcgatgcccagacagatgatggctttgtgctttcgcgaagcgtacaagacccttcggaggaattgccgatcgaactaatcagcctggcagatcggtaagcgtgatcatatgagtgcccatgcttcaacgttttattctgacagccatttctttaatagattcgtgaattctctgagcgccaaagttcataactcgcctcccacgatcgagaagatctccgagctcttccaagttttctacagccgcgccgagtcccacattgccacacatatatctgctctcatagctcgtatcaaccgggatcttccgccccaggttcctgcaaaagctccacgaggaagcgcactgtcgaaattgagcagtaaacgctctcaagacgatatcaggccagcagcttcaggtcgccaaatgttgactgcgtccgaggtggctgaaaagcgacaggcccgcagagcccttgaaaacaaaaggagcgcattagaagaggctgccgaaagaagggtctgcgagctggtttatgataaactctggaggcacaaaagtacattggatgatgtgcgggatgaaaagttgcgttccaagactgcggctttgctgctggtcggcattaatctaaaggatcttgggatcgatatagaccttgaaacaatcgatgagcagaagcaggacgaagcaaacgaattcctttgtcaggcccgagagtatctcgccaaaatgaacgattacaaatacccccttggaaagctacagcaactcgcagcggcgcacaaggccatcgtcgacgctctcactaaacttttaccgtcttcctcttctgcggatgagattctgcccacgttaatttattcgcttgtgacgtgccctccggaagggatcaacattgtcagcaacttggtttttatccagcgtttcaggtcttcaagcagaattgacggagaaacggcttactgcttaaccaatctagaggcggccataagctttttggaaaacgtcgatctttctacactacgtgccgatgagctgcaggatggccctctgaaaacccccggtgaaactacgacactatccgtagaacatgtcgatccttttcggccccccaaggaggctacaaccttggctgtgacgactgtatctgcatcgccggaattgtcaacaccagaaatcaaggaacccgcctctacattacctagacctcgaccctccatcacaccacagcaacgacgcctcagtaacattttccaaccgccttctaaggtcctcggagctgcaaatgatgctgttcgcaccactgcagaccagagtttgaagaacattggtgctacattggacagcagtttcaactttctgtttggtcgtctgaaggagatgcaaaacatccaaggaccaggcccggagggtagcggtccaatattgccaaagacactggccgaagctcgccgtctagtgagcttgccgcttgcctctgctaccaaccaaaatctgacccaaggggagctcgcagcaatcaattctgtttccgtggatgagagcacacccccacgcagtagttcgagactcacagatctctccaacactcctacccctcgagaccgaagtgtggacagcactcgaactcagggaagcggtaaaaagtccgtcacgacatcactacgcgaagattttgcattgagttcacccataagccccactccgttagaatcaatgcgaaactttggcagcacgcttaaccctctgaaccacatcccgggcatgatgaagagctttggccgcaacgcaccagagactcccagcggcaggtccgtatccccatcgggattggacagactcaagccatcacctgtttcagcagacggcaatagtggttctaacagcccgctctccaacccttcatcgaaaattgatcctcccattcagcgtttccttgagacacagaatgcgagtgatctccggatcggggacgtagctgttctactggaagactataagcgacttgctgctgcgcttcacaaacctagtaccgagtcttgatatgtttatggttggattatgttgttttgtccttcacattcattgcaacgggagatggagtattcttgcattatggatcgatggcgttattatatctggtattctatttcatttgggcgaataaaccttgagttagatagcatagctctggcgagtgagctacgcattgtccatatcatacatcattttagcaataatcaacccttcagaccaacatgaataaggatttcaagattcggagatagtgtgcacagttacatgttttgcttattcgttcaatatcccgaaaaggatgcttttgttcaagttggagatttacatgaagcgcacaggcggaggccaaatcctatccttctcccctggagcatccttcgaccaacgtgctgctttatgaagcattttcaactccaatatgttgcgatacggccgacgatttacctctggggaaagatctcgttgggtgaaacgcgcaaaaagtgtcggagcgatgtggttgatatgcaccttgagtggctttgcagtgttttcattgtcaggttctagtaaccagacgaatggtctaggaacatcacacgattgcaaggaatcttgatccacatagagaaaggagtctcgtcgtagaccaacagggaattcgttgctgtctcgcatagaagcgaatcgatcccggaaattaccggtaccatcaccggtgtcatcattttctacccaatgaagagcaaactttgcaaaagcagattctttcactaaggtcttagcacattgtaagccgtgttgaacggcagtttggatttgctccttgtacgacggccactcctggacatcacaaatggtaattttcggcgtcaattccgcaggtcctcatattctaggtgtaaaaggggtataaaaatatgaacatgaataaatcgagtcctgcagtggctaattgggcataacacaatcatctcaaacaacataagggttaatgataagagtaagagagctatttcgcaatcacgggtggcgtccacgcagaacctctgcaccgccagttctcatctcggtcaatttattcgtcaattccaaactttgtgtttcaacttggtcatggcggcgcttgacttcggcttcaaacacagcagctgtgcgacgacgggcacgccgtaaattcttcatttccgaaagaagatgggtgaaacggtcgatcatttggtctccacagtcttcccattcatccatggtcatgtgggacaaatatgtttggcgttcttggtccgtcagagtcaacagatgggagacggaattattgggtacctcagtatctgtgacaagagatggtgggtttggcggcaaggaaggtgatttgatgacaggtggaggaggggtcggcgatttgtcaaatggctcagcttggagttcagagaaagacttttggtaaagcacttctggagggtagtctgcttcaagtgatcgctttttcgaatggatggcagtgttgcgacggctgcgacgcgatagctcatgcaatttgcgcgattcgtgcacaaaaaacggatcctgcatggtgtggtcgacgtctaagtcggttaaactggtcatatcgaaggcactgattgaaaccccgccgctttcccgtcgttcatccgggcgtatggtgtgctccatgccatcgtcacttccaccgtcactatcggtaagttcgtgaaacgatgtaatgctgagtgtccggccaacatctggcggaggttgagagtcatggcgagtaggtgatgcatcgagttgttggtcgagttgttcgagaagtgaaggctttggcgggctgaaacgtgtcctgggtattgctgacgagctgtgagggagaagaatcttcctgggcccagtaggaggaagcatttgacccaatttccgcggccttgacgtcggttgtggttgtggttgagtctgaggctcgggatcagagtctatagtgacaggctgccgcgaagaagttctctttctgctggcggaccagaaattctctaggcgcttgctcaatggctcctcggttatacgtgatttgtgcgacgcatgccagtcgtgtgcttcgtcggacttttcattatccccgccatctccgccaagagacgaagtcatttggctttcagagtcatcgaagtcatctgaatcaaagccggccttcttcatggcttggtcacccaggccttcataccagttaggcccataagtatggattgaaggtcggggctgatacatcgattgaggatcgggattggtgtaggcagcattagtacttgatgctgcctgagatttgttgtcatcaaatccgtagacactagtccctgccacggttgaatcatcaatcgcttccacgtctgtgtcgaacacgtccctgtctcgctgtatcccatgcgtagagagattgcgggactgatttggaaattgagatgtaccgttaaattctagagatccagatctgccattggcccctgaaggacctggatcgaccagctgggtgaccggtacctcgactctggcttgttctgcacgttgctggcgcgactgggtggcttggccgtgagcctgcccaccttctttggagtggacataatcgccaacccccatagtactttttgaagctagctattgtaggggtaatgaataaatgtggtctttttcgatgacgctgaaagacgacggggtccaccgtaaggttgttgggcaaacgcgatatcgccgcgtagtcacgtgtcgatcatttccaccggctttaagcctcatctacagcaattagggccgccacggctgtatggaaccttacagcggcggtaacctccgggtataaatcccgaacaacatttagctaatgtgcttgactaaattgtgaataccagggccaactaacgccacataagggtgtaaatctttctctaggatactgggcaagggaggtttctaattataagataatgtttacctataaataaatgcatttcattggggtatattaagtataattttacatgaagttccagaagagaggaacatcaagatcatctcaaccaggacctcaatcagcagaatcatcatcaatatgaagactctccagattgtatgcaacacccctgcctcgtttcttggccttctcgaagagctcaatcgatctttggacttcagctgctttcttttcggttgcaagcctgtgctcacgtctcgcttcaagagagcctggggtcctatccatgagcattgggtcgtggtcgtcgtagtcttcgaagtgggccggtaatggtagagtgagcagcaacagatcaccgatccacaaacagatcatgcctctgagctccagcaattctggcgagtccgagtatggaggagaccctaggagctggtccatacgcgcagcaatttgctgcgcctgtgccaactccagtgccctaattgctgtgatggcagcatctgtcttgttttgtgacttccgagggtggccaaattcagattctgaattgtcatcctcagaaaactcatcaggctcttcttcttggcgaagggtaatatttttcctagttgccttgctttcttcctgtgtgatatacacccaaagcccaaacattgcagggtagaagtgcaaagaggagatagactgtggtgaagatttcatgaatgggtgattgagaataagtcgttcataatattctttagctgccgcaaagcccttggtggtaaaattgatgggtgtgctgtccatcgcattcggcaccttaatggtaccaagattggctgggatttcctgttcgtcacgccgtagcaaaatttcagcgccaatgccccaccttccttcactgcggacgtccattcgaaagcctctgtaatcttcgcgcaagatcatgccccaagctcgtccggctcgaacgtaatcaccttggagcatacatcgatgtaaaatggctgtcaatgcacttaggtgttggaagcgaaggttgccttgctgggtcgactgaggagggtagattggaggtgataatcccgctaagtctttgaggtggcgtgaggcagtctctcttctagattgctcatcattatctgccttatgagggaaatggcctttcggcaattcttggttggatgggaaaccggcaattcggtattgatgggattcatttggtgtcaagaccaagggaggcccagcgggctcagattccgtagccgaggcgatatccgttgtttcttcgccgttcagctcgctttcactccaccccacactccttttgcgtttccggcggtcatatcgagatacgcgagtgccaggcggctggagccaaggcggtagcggtagagaaaaaatcgaagacgacagcgcagccatatgctcaagatggggcgtattccatgtgccgccaaagaaaataagagccgtggcagtctatactagggcctaggctattgttgccccaattgatggttgcgcatttgtcagagagattggtggtggaacatgacggaatggagatgtgttgcctcaggcactcaaggcgaagcaaagcaggcaaacatcatcacttatcgtcctctatcaattgcttgctttgacatgactcctctactcctccttttactttcccttttcttctagttccccctttttgttttgccgagcgctctctcacccccgtttcgcgcttgccagtcgctggctgttcttttctgggcgtggttaccatagctccccgagattcaaggctcggcggttataccactcggagtgtgggctgtgcctagactcatcagacagtttgatacatctggccgctgttgctcgtattgggcagtgaaattgtctcaggcgtctcgtaccttttgcaaataacccggtaaccgcgaactccctgtccgctatccactcctttgttccaaaggtccgaaatacggcttcttcagaagcaccacccaaaaaccaaccgcatcgaccctgtcagcttgagcaagggatcaacaccattcccagacatcacttggatagccttacttgtcaaatccatctcctaggttcaacccaatatcgatacggtcgccgctactagccatatggtcctcgcgtggcaatgaacagtcgttgacactgcatcactccaacggtcacaactctgttactatgggacagtcctcttctacacaacgtgatccatccaataacggctatcgagtacactttgcacctttctcaatacagcgtggccctaacacgagggatgaaaacatgaatcatagacaggcggctgaacacaacggagagggtggtttgccaccccggccagacatgaacatacataataggagtgaccaagatatggcatccgaccggccaggccgaacctccgctgggggctcacaacctatgcgaagtatcgaagaggagggcgggcccgaatatgagctcccaccccgcgaataccgcactgcggcgtttgctcgaatggcagcacgaagacaatcgaccatgtcaagactgggctctaggcttcttccaaattcagtcattcgtggacttctcaacagtcaagaagagaccccggccgagggacatgcacatcgacacggcctagtctctccaagagctgagactgctcaaacatccggtcggttcagtgcgttcgattcattcggctccagaggaattactcggcgccgatctgctcgcgcgccatatttcattccaccccgtccggagtctgctgggatcccagatgcaccagcaaccccgacatacatcgactctccatctcaaatacctgacccgacaagagcatcctggcgtcgcagtgtcaggctacaacgcatgcgtcattcgatttcatctcccatttctcacatgttcggccagccacactcagatttgcggccgcacgaaagcccggaatacccaatgtcagatcctttatttgatgatagggctatggacacgcgtctggacttcggcgaacccccccatgaacttgaatcactagaaccatcaatccaggctgagaggccggtaactgattcgtcttctgcgcagccgagtcctgctttgatgcgccgattgcctgggatcatccgagcaagatcatccagagtcctgcgacgagaggagcaaacacctctgtcaagggtccttcagctcgccgcatccgcaattgcagctcagctgtccggcactgccggtcctgcgttgcctaacatccaggcattgggcaatgacgggttagatggctctttggagaatttcatccagagtttgcagcacgcgacttctgcgcaggctcaaccgcctgcagcagatgggtcgagcagtactgcaaacgaaggaccctcgcatcccgtcaatttcttgcgtgtgttccgatttgccaattcagaaccatccacaagcggcgctgcaaggcagagcgcgagtggtgtcggcgaccatgggacccaaaccgatggaatggacatcgacgagcctgctgaaggcgcagggcgaacggttacactggttgtcgttggagttcggtccgtcctggccggaaacgcaggtcataccgaacagcaacagcccgtaagtccgggcccaggtctagatgctctgcttggtctgccatttttgccacataatactactatcccacggcctcaagatgccactggtgaacctacccaacggagcgatgggcgatctagattgactcttcctcggaaccccaccggagctacagaacttccacgcccgtcagttcccaatcactttagaagaatgtctgataccggcccccgtgctggattcccatcctatcatccgtctggtttctctgaaagtcccccgggaccacacccgcctccgtcaacaccagctgaacaggggatatctgctttatcctccggcacttcgactccgagccgtagaccatcctccgcttcagcaattgctcctgatattctgccccatctacatgaaggccaggcaatgcgaccgacggcggagactctggatgagcctgtgacattcaataccgctcgccagcgacgtcgaagcgattctgagtatgctcgtcatcgggccctcggctctggtgctgttcgacgcaatggcatggttgaacccgatcaacccccaccaagtggaggtcgcagttggttaatttatgttgttggaaccaacctttctgaaaaccacccggctttgaccacacctagtcttttcaccgatgtaagaatgccctactactcggctttgtcaggaacatgatgactaatactttaaacagaacccaacctacgaggatatgatcctactttcatcactattaggtccagctaaaccccctgtcgcctctcagaccgatatcaactccgccggcggaatattccgtcttgtcgagtatgcaggttcattggtcgccgaagccgtcgaaggcgctgcctccattcaaatccaagatggggagcgctgtttgatatgcttgagtgattatgaggtggcggaagaagttcgagagctgaataaatgcaaacatgtcttccacaaggattgcatagaccaggtttgttgcctctgtccattcgatttcaatctgttcgcttgctgaccgtatttcgtagtggttaaccactgggagaaactcttgtcctctctgccgaggtcaaggcgtcaacgaaacccccagcaacgactccaataccgacaactcggtacccagtcctgcccctgctccggctccggctccagatggcacagctgtctgatctcttccacctagcaagcatggtcaacccaactatgtgagcaactcccaccttttggctttcgaaattcttctctccttttagctttagcatgcagcgtgtgtttagaacctgtaacgatttttttctccatggatatcccctttgcatctcatttctgtgcatcgacttttggtgcttttatcatgttgggttatcgaatatttggtctcggcgcctagaaacaaggaaccctcctcttggaagataactctgacttcgagcctcgagaatgttagtctttacgtctatcaattgttggtcttcgtttgttctttgtaatttcgtaaattgacacattggctggccatacccatggctctatctggctaggaaatgttctactcattgaaatacatgtacaaacaataaggctatacaaccatctatcatattattgccattgatgttccctgtatatatacgtggtagtataccggggcccgctgccccgcggctgacttaggtaatccaaaaaaaatcacccaactccattgcggcctggattgcgccagcgatcttgtgctatttcgtttattccctaagctttgagagtagaatctgcagtctctctaacaaaggcagtactcaattgacctcaccgcatccgaaaaacggttcggccgtgtagtctacactttcaacctccggagtccgcattttcacgacaacccccgctacaacccaccatgacttccccgattcgcgtcacagtcctcatatctggcaatggctcaaacctacaagccgtgatggataaagtggccgcaggtcagataaacgcaacaatcgtccgcgtaatctccaaccgcaagaccgcatttggcctcgagcgcgcaaccaaggccaatatcccaaccgaataccacaacctggtcaagtacaagaagcagcaccccgcgacaccggaaggtattcagctcgcgcgcgaggaatacgatgccgagctcgctcggctgatccttgtcgacgcgccggagctggtcgtgtgcctcggcttcatgcatattctctcaccgcagttcttggagcctctggaggctgctaagataaggattattaacttgcaccccgcgctgcccggggcgttcaatggcgttgtaagtcctagagctctttttgagattgtacattgttagctggaatgatatgctgatacctgtcttgttgatttttagaatgcgattggccgtgctcatgctgcgtggttggcggaccagactgacaagaccggtgttatgatgcacgatgtcatttccgaggtggatatgggtacaccaattctagtgcgggagatccccttccggaagggccaggatgagaacctcgagacctttgaaactcgggtccatgagatcgagtggggagtcgttgttgaaggagtggataaagtggtaaaggaattgatggcccagaaagaaaaaggctcaagtgcatgaatagttacccatttgtcttgggtgacattattacttcgcatggtgtacgaagggacgccgcgcttctcgatctgcattttgttggaccaatgatcgacctaggactgcaagtcccgcatgatgccatcttcggggctgttgacgatttatgactgtatatcttgtatgattgcagaaaaacaaaaagacatatatatgatcatattgcaaggtgtatatttcacgtgttctggggtgccaatttggagatcaaagccgcggcgtggattaagacaagaccaagacatccactaccaactggaggaaagccaagaacgtgccgagactaccgttcagacatacttcgtatccacgtggacaatcatgattcatacctgtctcatggtacggaagcacggagtcatgatagtggaaataagaaatggagaatcataaatccaacggcgccccaagccaagctccttgataatcaacagggatgtggaatgcaaccatttcaccggtcgaattctcatcacacgccagtcctgcacggcggatttagctgcatactagcccctccaatagggaactatactatctttgggaagtttatgcctggctaccctacggactagtccattcaaagtcaggcttgcgaaccgcatttgaactatgtctcccacctgcgcatcccgggtaatcattcgggggatttgtatgaccccgccttatctgtaacgtaggacagatcataaacgcagttcacgcgggaaaagcatacactagcaaaagagggtaggcgtggtccatgcagtgcaaccaagacaaaaaagtgggcaatcagagcgttgcagcgctaaggtggccgttggacctatgatcgtggcgccaacgtgatagatcaaagtcaattcctaacgtcttggttcaaggttgtctgatggctccaccgttcctaattccgtcggatgttgggcttgatggtggattgcaacgatgtgggttacttttggccccaaattcacaccggcgttaactcaagctgtccggacatttgagatcggcgaatatcatatccatttcgagcgcggactgggatctgtcatggccaagtttgggggctctgatagtggttatgctttgcttgtttcatgcgcttgatacaacatagacgataataactgaacccccattttgtacagtgaagacagacatccgaggttataggatgatcattacttgacctgatactattttgaaaatcggggtagtcagctccgactgccgagaataggaccaaccactttatatccacctattaggatagtacggagtatatatccatgactatggtaaaaaaatcaccacaacactgctttataatacctttaacccgccatggtaaccaataatagagagcttggcttgtaaacttccgggccgacatatttttacaagaaagacacttttcttcgtggcgcgcaatgacgacaatcttgaacaaccttttaggaaaatgcgcaatacaaagtagacctctaggaacgaactttgatctcggcatatcaaaaaacagaagggaaaaaagaacaaaaagggggtgataatgacgatcccaagccacagggatgaatccgagtggtcttcgggcttggccaggcctactacaatgcagaggatcatgatcatagcgtctatggatctgtcccggtttccccgaggcattttgtgtacggagactccgtactccatattgtcttgcctttttctttttcgttttcgcattttgcttttgtctcttcatatcgactggggactggtggatccaaaacaaaactacggagtaacaagggcgattatccgttgttaagctatctgtgactgtacggagtactccgtactccatttaatcttcgagccgggagtcccgcaattaaataaaaagctagattcggcaattctaaatccttcgagtgcgtactccgtagataaaaaggaatgccgaaaatgttctgctgatggagatctgttctaagtggaggcggctgtagtgtgggaatcaggtcctcattcgagaatcggagaaacaatagtctctcattaaatgtggggggacattttagttcctttttcttttcctttctgtcttttctctggtcaaaaagtactccggagtcccgccgttgtaaaatgcagctgtagtaactagcaccgtgcctgatcgacagtaagttgacagagaaggtgggcctggcagatcgaagacactaaaagcgttggactgacttcaatactgactcgagtatctccatttggctagaagcttcgtccaggagctgcatcacccccaatttgacttacagcaccagtgcggatatcgaaatataggggtaagggggttgcatgtagattgcaactctatcaaacgaaaatgatacatagtacctacctaaatgataatcccgaagcatatttcaaggccccaaagctctggccacatttaacccataattaaatgtctgggcagtgcacgagcatttaatctccatgtgggtgagatataagggctaagacaacgctagtggaccaccacctggcggccctgaggctcctaagggggtttttcgggggggttttgggggtttttttgtctcgcaacgtccctacaatggtatctcatgcatcaagcttggtctaggcggatctaaataatatctctgccaggttgttatacggactaagtccgccatagatcctggtagaagttaaagtccccactaaatcttttgccactattcccgatttagtatcatttagagagcaacaaggttccaagggagagcactgactgttagtgagatcagcaggcagaaaaaagtggttctctggtggactcgctggagatcatatggcgttgtgatttgcaaggtgcgtgcgccgaatatgaaaccggtgcattagtatacgacgttcagccctgttgtcttggtcaaattgaatagcaatagagttttattagatgttcctgatcttcgttgaatagggggggctacataggatagtgatgttggcagtgtaacttgacacctactttgtataccaagacccatatgtggctccaatgaaataagttttgatatagagcaaagatcttctacatcagcccatactatatccacaatttcatattccgtatttccataccctactcttctgaagctcagaataccacgttgtacggagtacatatcgcattagatacatgaaccggttgcagatcacgctttagcttctagtctggaggcgctaaaagaaaattgtaggagtaattaaaacgaatgaaatcagtcgtcacatttttaattcgtaaattgtcgcttttatagccaaatccatgttttttcctttttgcttcttccaaggttcctttttaatctccgcacgtcccggtcactgacgtcccccaccaacttcatctctcctctccaagctttctttgataataagaatgacgactcggtattgttgaattggatggaattaagaggattcaagggggagtttgaatgggttttgtgatccgacaatgacgcattcacagtcgccccagacggccatgtcgggctttctggactcaatcaaacaggattcaagctcatcttcgtattccttgtttggaccgaaacagtattccgagagtgttgcgttttggcacgatccctccgcggcaccgacaatggtagtgcccccttcgcatacaacctcccataaacaactctcggaccagaagaagcataagcgcacccggagcggctgcttcacctgccgttcgcgccgggtcaagtgcgacgagaaccgtccagtctgtgaacggtgtaggaaagggaaccgcgattgtgtctatccgtcacccaccgcatcgtcgtccgcatcgtccgtaccctcgaaacctagctcacgctccacagccaagtcgcgtgcaagtcgcccgcactctcacggcagtgattcatcatcgaaggtagactccgagtctctcagccctttgcatcccatcatcgacgaagaggaacccgacagttctgtatccgaatcccgaccgtcgccagcaagcgccacaaccacatcacagccggacctgcgtaagagtcaaagcgcacaatcacttcggaaacatggtgcaagacccgcgtccgacactagttcttacatcaaagaacagagtagttcgccatcaactgggtcaccgcgctttgagtcggtgagtgtgcgctcgggcagccttggacattccacaaccgaactgctcaacaacgcacgcctaccggacgatttgcgattctatttaaatttccaccaggattttatgactcctccgcatttcttcttgcgacataattcttcctatttcatccaccacagtcttatcgaacttgcattgcaatatgagcctctcctctacgccctggtgggcttttcggcctaccactattctttacacagccctggggggaagctctacacatttttgaaatactataataaagccttgactctcctacgaaaatctttgagttctggagaggagcacagtgaggctacactatgtactgttctagttctgacaacctttgaggtatattgctcctgcctcccccaagtaccgacatctttctgactttgttgcacttataggaattcattggcgactggatgaatatgatcgatcaccaccaggcggcacatgcattcatgcgaaagctaatcacaccagagtctgccaacatgaacgagctacataccaatatcttcttatggtacgcgcgctttgatgtagtcgtggggattttgtccggcaccgaaacagtcctcggtcgagattggtatcttgcaaaggagcagcatgatgccgagcaagccgctttctatccggatgatccatccaaacaactcgcccttgtggcatcaatcaaccgacgattcggcttggatatggcttccctctatgcgaagttatctcgcggcatgttatcaatggaacaattcgccattcagaacgaccagctgggccaatggctcgagcaggccaagacgattcttaggggattcgatgattacgaatacaagatccaacattacccgcagaagcaacccttgaccgaagatgacgttatcgatccatacgtcccaggtgtcttgtatcgaggtcctttgtgggatttcaactatgcttggatagacattctcgccaccgagacaatgtacaagttccagaccatgcaagtcctgcagcagcctttgcttgaagacttgcaaacattggctaaggagcaatgtcgcataatcgagacgatgattcgctggcctcacaaggaaaacggatattgcatcaactttaaaaacagccttggcatgttgggcatgttcctacccacggagcatcagcataagtatcaaatgtgggcccgacgcacattagcgttgttagagcaacatgggtaagctttcaccggcgtatctgcgtttcagatataaatcagcaagagcaaagctaaccaggagtcatctatgcgaataggtacatcatcgtccctagtttccgcgccgggctagctgccatctggcaagttccagaggttaactattggtggctccctaacgatgaagggtatacaagcattgtccgcgagattcgctccttgaccgacgaacgctcaacacagccacgcgatgagaaacgtgagaccgttcgtgatatgaagtccctcttcgggaagttaaatctggatgaaaccgacgacgacaaaagcccaccatagtgatcttgtgaatgaggtcctttgtatttgcgtcgtctatctccggtccctgagttttcgtggtcttacaagtacagtctccgctattcttggatcagtactgtcctcccgacattttcacatcgaaacgcaaaacatatatgcttactagtcaccctgacaacccgggcaactaatccgacttacgtcctgcgactggatggcacaagaccaagtctcagttgagaacgtttcattggatatcgactcacacctttcatcctttgctctgcttttgccgccctctcacatcctctcgccttctctcgaaatactcttgctatataatgtcttatccacatcctccctcgccttttctacctggtcatactatcatccccccttccccctggaccccgaagacgtctttctcggtcatgacttgatgtacattattatacccaaatccatataggatcattgactgatgccgttcattataccttgtttatacgtccctgctttcaagatttttcctcttttttacataagccgaacagcaagccccgggcctgtaggtgcagagtcctaatgttaggaatgagcacaggttgatggtgatagtagagtatctcctaagaatcaacccgacacccgggcctccacggcacctcctcggctattatgacagtctccaacccacccgccaactctccagcacctccaactccaaaatcatccccctccatatcctccccccacggcaaggcatcaacatcaacctcccaccccagcaaacaccgcagtataaccccagctccagccttactcataacaacattcatctccttgcatcgctcatcacaaacacactccacacagccctgcggcgtaatacaggaacaagcctcaatgcgcgaaaccgcccgccggagaagcagcccaataaactcaaacgccttactagcaataccagaaccacacgacccacctttcgcatcgtagaaggtaagccgagcaggcctctgtcgcgaaggcggtttaagcttctcctcgaactcaacgggtacattcgcgcgctgcagcggccggccaagctctttcttcgcgactttgcattcagtgcggacgtcaccgggcgaggagacaacgaaggagggcaggagcgagaggacggcgtgctcagcggcgtggatggccgcggctatgtttagccggtgcgattgtaggatgtcgatagcgcgcgttgggacgtctagccacatgcccttggtgagacggtcgattggcgggttatcaacggcaacggcgtcgaggacgcggccgcgcttgtcgactttgaaaaagccgtagactacggcgtggattttgattgcgccgaagaaggcggacgaggcggaggggtcgttgccgaccagacgcattgcttcggtttctatggggtcgatgtcggtgaagtcgcgttgcatggtgttccagtcgacgtggacgcgtacgacgcgtgctaggaaggattcggtgtttagttctttaactaggtaagttgtgccttggtggaggaagatcccgccttcgtaaattgtgaataaggcgcgcgatgcttcgacttcttctatgactatgttgcggttgttggtcgtgtctatgacggcgaagtgttggtcttctgtgtcgcgtattgagacactgcgggatggctgtggacggaatcgtgggtggcagtggtagaagccgagtgaatcttttattaggcgagtcggggccagggcaaggagctgttgcccgaagtagatgctgtcttcttcggggcggataggcatctcaaatgcagcacattgaacgtggccttcgaggatgagctcgttggatagatctatctgcagctcacagttcggtcgcgtgaagatttcatctggattcttcatgtagtgttggtcagttgggtatctatccccgactaggacggatagggagtccttattgcgtcgtccagcgcggccgctttgttggcgtaaattggagatcgagtatgggaagcccatggtgatgactgcatccagggagccaatatcaacgcccaattctagagcgttggtagccacgattcccatcaatttcccctcgaacatctccttttcgatttggcgtcgatcttgagggctatagccgcctcggtagcccatcactagcttgccaatctctgttcgttcgagtctaccaaattcggcgtgcacgccttgtaagagaacttcacatagctttctgattcgacagaaggcaatgactctcacgcccctaaggatcagctggcaaaatagcctcgcagtctcagtgacagtgtcggcgcgcccagaggtaggatctttggggtctttgaatggcgtattccagcaaacaaactccttacggccagagggagatccatcgaaatcgatgagtttcacatcctgcaccccaaagatagacttcatgtgatcctccgggttcgcaacagtagcagagcaagatatgaacttgacatgacgattaccaaccgcagcacatatcctgcgaagacggcgcatgataaaagcgacatgagatccaaataagccgttgtagacgtgcagttcgtcgacaacgacaaatttcagattcttcaaaaatgtgcgccaggaactctcctgtggcaaaattgtaatatgaagcatgtcaggattggtgaaaattatgcgtgcctcgtcacgaatcaagttccggctccccattggcgtgtccccgtcaaaggtttcaaccattgtgtgttgcagcccgctcatatactgaagtagatccatcatgctgcggcgctgatcttgtgccagagctttagtggggaatatatacatccccctgctctccggatctttttctagttcgtgcagcatggggacttggtagatgagggactttccggagctcgttgacgtcgacacaatcacattgtggccctcatacaggtggttaattgcctctgtttggtgagcatacatttgggtaattccctttgtgttatacagagcattgacaaggtcctgcgagagctggaatgtcaaatctccgtagacagcagactgggcttcgaacacccgatgaccttccggcacaatttgtgcatgatacaaatccatctcccgaatttctgcaattatttcctcgatggactttcgctccttgggaattgttgctggcggcttctctgcaagaggagtgggcaggaaagcattcttcttttcttcaagagaattcactggatcgagattcatgtcctcgcaatgaatcaaaaacgcattcaaagcgtctgaaaactttgaatttcgtttttcaatcaaagccagcatctgtttttggctgtagacgggcattttcagatcatcgtctctcatttgacgcataggtttcataggttccccggttttcgggttcagaacttcccccttcagatcgccgtccataaactcaaatagcagaacttgctttgtgtcgtttgtatagtgaagatcactgcttctggcatcttcaactctgtccatatctgccgaaaatgccagggtacgcttgtgtaacccatactgagtaatctcttcatctccaacggtcattacttccagcttggcttcgtccacatattcgaaaaggaccgctccgggaattatgaccttcacacgtgcgacatcatcaaccgtgagttctcgcccctgaccaagttgagcttgtactgctttttttatgttctcgaatgtggtggcaaagtgctttcgcgtggagcaaaacgtgtacacgagattcaaggcgcgatgggtttgcgagaggcgcttaaaggcgtctggcaatggcgtagatggagttcgtttcgagggcttcgaggtaactttcttccctttacccgtctttttggcggctgtagttttgagagatccacctgtctgtacatcagattcattggggggaggatcgaccgtggtcgagggtgtctgatcggcagggtcttggggggacgcgttcaagggtaagggcacatcggactcaaggccgcgatcgctttcatgacttcgttttcgctttaatgatgagacttccagtggtattgagaaggagcccgccatgtcgaagctccatagtgctttatgttggagctgaagtcgataaaagtcctggttgacgggaaacgcgaaatcacgtgcattgagatcgcctgaaatggcagccgttccacggttctaaaattggccaatgcttaggtctacctcgctcgtttttatatcaccactacccaatccctctgactagcggtgaaatccaaaataattatttttcttgtatggtcctaaggacaaacccgccctcaggctagccctgcctcaatcacgctttctgcaacgcctggataggtgtagatattgaccactctcaatccaacttgggccaggatatctctccaatcagcctccgttctttccctcacagcaaaatgtgccaacatcatcatatccatattggtcgcagcgagtgtaggcttttcttcgttaatcacaatctcgttgaacaagacccgtgaataatccttcttcaaagcaggcacaagattcttcaggatctcgatgccatcttcatcgctccaatcgtggagaatagaatgaagagagtatgcgcgtgcacccttgataggctgcggcgtaaaaaagtcgtgagcttgcacttcaaaagctcgcgccataccatcagctctcacacctgcaatgacaggctctcgatcctggagcacaatcctacccgagcaagggctataatgcgcagcaaaggtagccacatcatggccctttccgccaccaatatcgacgaggagaacgtcgctaatagaagcatcgaaacccgtggttaatcgctcagccacggggtagaagtcatgccaatctggcttacccgcacggtacgcgctcataaaggagtcgaaatgctcttggtgtggtggtgtttcaagaagccatttaaagaacggaaggttggttttgtgcgcctcttgaaacggaccgtcagttccacccagagtaggggaactatattcggatttcttgaagtattccgggaacccgttgaatgaagggcgtgccacatcgtagcagaaactgatgctggattggtagttctccgctgcgagactgttgctcagctttgtggcatagaaggctccgtcatggaatttcacgaggttcattgctactagatgtcttgttaggcgttgtaggagaatattgtcgatctgagtcttctgggaaaaggccgatgggctgagccctgtatctcccgcatccttgaggcattggaaaagcttcacatcgacagcgagacggatgatggcgctttgagccggctatcgtaaactccaattagtttggtgaagcaaaataagctcccaacgattttgcagcttctcacctctgcccagaatgtgcgctggatgaactcgcttgggatctccaatgctgtaatcagcgcgcggctttggtcaatcagactttctcttgagcccgcttcgttcttttcaaatgctgcgcgtgaattggcaatcccatctaggattgaggagacagatgggaaggccatgatgatatttggcgttgacagtaagtcaaaagaacagacgctgtctgttaaagaggaaataatgcatgttagaagacctacttgcccctcttcctcccctattcttgtatttttctcccagaaatagtctaaggctagctgctagtacgtggtagacgacacggatgaacttataagccattattcacccgtggaccctccaagtgcggcctttgaccaaccaggtcttagacttctatgggaaatgatatagccattttactactagatcacaacaaaaaccaaggcacggagtacctacctggttatagcgtagtggggccatatctatccttattccaaattgacaacttaccttggcgttggcgggtgctcgttcggagttgaaccgagatagtaataacaggccgttctcacatcactagatccagaaagtatgttgggagctaatcacccatgttaagtcttttcaaaaaactagcctggcgcgaactggcgcctgaaagaatctcacctcctaattatgtacaatcggaacataagctaagaggcgctatgagctaaatcgtttagctcgccgaggggataggtttcacctatacattcagttagggaaatgatctacgtactccgtccggagcaaacagttgagccgtgcctaaagtacttaaaaattagaatttcaggagattatgcctcttagttcacagtaaagatagtccctattacgttcaatccaccatttccctattcctcaacacgtatcaaataaaatctttatgactataaatatgatataaatatgtccaacagaggcagagataataggggtacgcacggtcgccttaacccgccatggagtacggagtactccgtagtagcctcaatggccaacaacaatccactttttacaacttgaataccttcaaggctatgaagtatttgtagaagaaatgtctatatctcctcaagactgttccggatcaccaacagtgatgagtagaatccaagtataagcttcctgccaaaatcatctgtttagtgacgttgatgttgagtaaacttggcacatttgaacagagttttttcctaaagcttgcctccctatttttatttgattcgtcatcgtcgctcatgggcccataagtatattttacatgggtgttcaagatatgaacaagcgcaattatggaatactagtcgatacaccataccggctagtactacaatataggcataggtcaaaaattattcgtgactttcaagattcaaattatttgcacgagtttgtttcccgcacataattgtttcaaactgcctttcagagaaacgcgctgtttgagggtttcttctcgatcgattcctatgcaacgaatgtataatggactaaccctttgaccatggcctccttcaacacaaatgttgatcatagtgaaaaccgagctacgaatatgaatgtcattggttggttcttcaccggcgttgcaatcgcaacagtttccttgaagctatttgcccgaattggtagcaagcggtttggctgggatgatttttttatttttttatcgatggtatggagcactcccagatctccctagacaagactgacattgtggaaattgttatgtaggctctcagcatcattgccatggcactcgtctcttattcggccactcttggtctaggtcggcacactgcaactgtagttgctgaatatggcattgagagatacgaaaaatcagcctactggcagattattggatttcctttcaacattggtatgtttacttactcaatagagaaaatcaagtactaaaaccgagacctataggagcgtttagcttccccaatatctcgattgccatcctgatcgttcagctgcttgaccccaacccacttcgtgcaaatctcttatacgccatggttattttccaggtcatattggccatgatatacgttttcatcgtcttttttcaatgcaaacccaccgaaaaaatgtggaactcttccattgagggcacatgttggagctcggatattttcaacggcttttcgtatttggtcagcgcatatacaactatgacggatattgttttggctattgtaccaatttctgcattctggaaactgcaaatgccgttttcgacaagactgagcgtctgcattatgatgggattgacactgctttccgcggttgttacgattattaaagcaacatatttgaacttatttaccgaccacactgatcctcgttagtggaccaccctagttttgttatctagctaacagctaacatctggtagttttcaaggtggtgccgttggttctttggggagtgtaagtattacccactgtttaccaagcctgtgctaacttgcagcttaggattgagcaaaatgttgtcattgtcgccgcttgtatcccgacactccgccctttattccgcaaggcattcgagtctaccactggatcctctggtgaagccacttcacaaagagaaacgcgctgcggcttcaaactcgcatacagttccatacaatctctctcgaagcggacattatctgtgacggaattacctcttaaggacaggcagcaatcctatgatatcgagagtagtagtagccaatttggcatatggcggacgagagaggtaatggtggaaagtgacgacgataggtctttcgaacgcggcgttggaaggacagataattcatttaggggattgtcacaggaaccttccccccttagctaattcgatcccactactccgtactagtatatgcattctagtttacatggtgaaacaaaacatgcattttgatgagaaaaattcgtataatctacctgattactataggatttagcccttgatggtaaagcggttgataaagcagttgatgataggacaaaagttgacttaatttgttagtggtttacatacaattataatctcccagttgatttatcgataactccaacatgttcgcggggacaggctcaaggaatgatccgatcgatttgaatccaagtcctaaaaccagtcaatcgtgcagtgagaattcgaggccgtcgacaacagtatattcttccacaaaaaccggaataacttcgctagataacgaatctggtagaacacggtatgatgcgtcttcttcttctacagataagagaaatgttgaagttgagtatttaaccttacttccggtcaacagctctatcattgatagtctcttagcttcttttgaagttgaaaatagcccgatatcatcttcgcgtccagtcgatcatattgttaattagcccattgacattaactccattaccacattaggagtcggatcgactggtacctctgggctcaccttctttatcatattcagcgtcgacttcaccctcacttacttcgactgttgtatctataaggatcgaaattccgatcccatctcgaccgccctatgatccgtcagcatgtttatatctagtgtgtattcgacaatgggtaaggatgccactagatgatactgattgtatatgattttgaacctttatatctgatctagaaccttttattctatcagactggtcatatggcgaagagatagtagttatcgcagtttctatcgaagaatatcatctagtcgacggcctggaattttcactgcataattgactggtttcaggacttgggtccaaatcgatcggatcattcttcgaacctattcccgcgaatatcttagagttattaataggatagctaattggtatatgaaccataaaacatagataaactgggagaatatcgaaaagaattaaatagtaaagtagtatgaaagtaattttatatgcattgaaatgtatagaaatcattctgacgtgaattccggcatgttccatcaagtgagtaaacatttttgatggggtggccgccttcgcggaaattgcaggcagaaagctaaccgccattatatatagcatgttgattgggtatgagttatagatagtcttgtctaagcctggtttacagatttatgttatggatgttatggacttatggaatcttatggaattatggattatcttatggattgtaggtacctgatatggggagtttgacataaaagcggtgtaaaaattgaaaggcggtataggcctcgataagcagaatcaggtgccgaggcagaatgtatgcccagttaggaaggcggtatttgaatttcagtcagggcccttattttactacactcatctttatcatcacccaaccaactacaaatctattcttttctgccacaagaaccaaatatgattcggcatccacgctcggcccagcctgaccccataaccgtcgaaatcggccaagtacttgcacccctggctgtctttccatggggaccgcttgcaatgcactacttgggtgttcctattgtaataggtgttagtacggttatcacttattggtattctagcgtctactaatcaagtcttataggttgctatgatcgccgttcgtgatgaggactatcagacagcatgccagaagctaaagcacctgggattctatgaaataattcctgaccgcacgattctccccgagatattggcagcgatcccagatccagatcaagcaattgaagaggttgcgaaggagtatcaacgtctggataactcaactattacgttcgaatatccacccaatcacgacctttctgggagtctacagttgactttggccccaaactccttcacgaatcttcaggtaccggatatgaccggcaacgtgcagcaagaccctgtctctaccacgggctacgacatctacggcaatatatgtcacccacttgaagaggcgttggttgaaagttacgtcaggagcgttattgacgatgagaatgatcagaatgagttttctggttggggagatagactaagcacctgggtggctatgatgtgtggatatcttgaggtcaataacgatatcctcgatagatgctcggatgagcgagcagtggaatggtttagtgtgacctacggtcggatacacgaggaaaggttcggtcccttggatagacgtgtctcaaagcgactaggttccggaagggaaatgccagtggatatgaggggcaacctgttgcccacgtaaagtcgggcattttctgtatcatacggtgtggcgaagcagatcaaagcaggtcatttacattttatcaaagtctacacaattagaaagcgttcatgaaatcgtctgttgatgcgaataggccgagataactatagtccggacccaagacctccatatcaaaatgaaatgagagggcctaaaagcaggcaagtagcgctaatgtttgacgtaatgaaaagcgaagaagaagaaagaagaagctcaagtgcaaccgcaaaaaccccatgtctagcaataactgaagtatgtggccgaaatcaggaagggagacattctctagagaaaatgaatattagtaaaattgactttataggaaatgaaaataggttgagtcttaccaattaccgaagactgaattgcatttgatgcttcggcgaaggctgctgtggagacgggggcgttccctcagaaggcttgctaaggcaagttgcaattgcgcgtcttggtcaaaattgagttctggtctgttgggtacacaatatctaaccaaccgcgcaatgtcttcgatatcggtcaaatgctttggaccctgtcgctggtactgggataagatcttctctcgcgtaagccattcagctccgaagattttcacgggatatccgttgatagtcctggtcacacgtgtcgccgtctgaatattatactgcggcctttgtggtcagctagcgtgatcgaaaacctccaactcgataagctgaatggtgccgcttggggaacgtagtctgaatgccgggatcacatgtccgaattggttgaccggtccaaaatcagcagggaaagcgttcagcaatcgctgtgtaagaagatctgcagttatgtagcgctggtcgacatgaatgactaaatccacatcttctgtccgccggctgggatgtggtgccatgaaacataccgcggcacctcccatgagcgcgtagtcaatttgcaatagatctagacattgggcaatgcgggagacgacggtttctaactggggtagaagtaggccacgcattcttcaatcgttctctaatatcacgatggtcagatttggagtgggagagtgagtgtgatttctcgtacctctgcgtgtgcggagagtcgctgtgggactagaggttttatgagtaaagaaactgatgcaatgagatgtgcgcagagaaaaggtaagagaaaggaagagcagatgagcaaaaaagcaggatatgagaagagcaggggagcggaggagcggaggagcgaagaaactgatctaatgagatgtgcacagagaggaaggtgaagggagatgaagagagagggagagaggaagagcagaagagcaagcccggtgaggagcaggcaggaaggctgcctcaacaactcctcgtctaggtagcgcaacccttccacatatgattttagagaggtcatagtaagagggatgtcaagaatacagcggggctctgaagcaaagtaaattacctccctctcacctctgttatctctcacttcagttacctcttatacttgagaataagtttctaggtatggatactatgatttctatcattctacttgtctaatcaacatgaatctactatcaacttacggatgttgacttctcaactataagagagacagcacgtagctgggtctgtgatattcctgaaggaatttcatttgaggccaaaggatattcaaggtttcttccgatccacttcggcccgcttagaggaactaggtcccggcgctatttcatctactaaagtggggtctaaatcctatgatgtcgagagtagtagtagccagtcaggcatatggcggacgagagaggtaataatggagaggaacgacgatagatgcgttggaaggtcacaattcatttgagatccaaactttctagcgaagactacagagtaaaccacctagaaaaatggagataattaaatttgtatagcccaaaagcttcatgttcatggggtcatcgggcctggttattccgtgctggctgtaaatcgatgcataaaagcggttaaattcaggccaaatttcaggcattaaagccctaacgtaattcacaagcgagtgacgcacacaagcgagtgacgcaccccacccaaaacgcgtctatggtttagcacttagttaattcaaccacccaccatgccaccaattcgctctcgaagctctcgaaattcaatagagcaagaaggcaggatcttgttagctatccaggctattaagggtcaagaaatcagttctattcgtgaggcagcacgccgattcgatgtgcctgaaactacgttacgtcgctgtctccgcggtgttacaaaccgcgcgacttctcgcgctaactcacataaattgacagaaattgaagaggaatctcttcagaaatggattctctctatggattctcgcggttcagccccccggccctcttcggtacgagaaatggcgaatattctcctcgaacactgtggaataaccccagtcctttcagttggcgaaaactaggttataaactttattaaacggtaccctaccctttcctcccgattcttaagacgttataattacaagcgcgcgaaatataaagacctaaggattattagaaagtggtttaatctagtttaaaaaaccattcttcagtatggaatcgatccggacgacgtttataacttcgacgagacaggttttgctataggattaactgtaatagctaaggttataactagaagtaaatactacggtcggagatcacttttataacctagaaatcgcgagtaggtaactgtaattgaatatataaatacagcggggtaggccctccctctgtatattatttttaaaggcaaggtcttctttaaatcatggtttaaagaccttcctagcgactggcgctttaaagttagtctaaataggtagatattagataaaataggcctccgttagctataaaagctctttattctaactacttcttcttatataaaaggggtatatcggcttttagtacttaacggccataaaagctatttaataccaaagttcaataaaatttgcaagtaaaacaacattatactaatttatatactaccgcattccttttaccttttataaccacttaatatcggctgttttatagtattaaagcgggtatacagtcggctagttaaatcaaaaatataggtcgggatcaactatattaataaacttaacttcctcaaagtatacccccttatataaaataaagcttttaaactagagacaattaaaaatagcttcttagcagccggtttagtaccgtttttacccaatcgggtccttttaaagctaaatattcgtcttcgaataccaactccccccccaagccgggatagcgattaggaccctaaaataccttcaaactacattcaattataaaagcaagctttatcaattaaagcattgcttcgtataagatcaagaagccctccgagcccgctcaattcggctattaaccaggttttaaaagcctgccagattactatgcaatctaccgtacttcttgagaaagaagtaagcgatttacgggctactaacgagaagcagaagcaaaagtgtactagatcccagaggcagatacattccgaagaaggcctctccgttcaggaagcttctcaattgattactgcgccggtggaagtagctgaagcacccccccgcgctcagcgaagaaggccttcgctacctttacagccaagaactagggctttaccaacgtgcgggctatgtaaaactcagggccataggagagatacatgtccaaatagatgatgattttagtttattcaatttaatggcgttttggttgggataaatacattcaaaattaataggttgggtagggtgcgtcactcgcttgtgtgcgtcactcgcttgtgaattacgttagttaatacggtgacaacgacccctctcgctatgttatattgtactttacgactagaaatatattccagctacttgtttagagcgtaatatttgcaattcgtcatcaggtaaacataattcaggtttcgcggcatcgggaaacctgcaccaggcatatctcatcagtatatcggtccgagtctgctgtctgggacaactccaagctggagggcgacttggccccttttgtgctatctccaagttgcgagaatccaggctctttggtatggcgtggagtactgctataccttgaacgaggttcttttgaggccgaactaccgacgagtttccggcctaggattctggaaagcaaaggccaaatggaaggaaggcaggcagcaattatgataacgccactttcgagaattgtccaaatcccaagcttgacagaagtccctatcgatattagctgaggttgagcgtggggatcttgcatgacatacaggtcgggtctgtaagagcactttcttggaaaaagatagtcatgcgaagaatactcgcgacggttcccctatcagcagtgtcagaatccctccaagcagaaggtcattgtgaaaactcacaaacttcccagaaggaagacgccggttaaggctactttctggccaattcgggtgtgaagtttccagacatacggcagcggcatcaccaagatcaaaacatcggtcatgatattaggaagcgaaacataacggtagaaagcctcttggttgaagcatgagcctccagcaattgttctatcccatgtgtatgcgattggcgaacattgaaaaatcgccgcgagcaaaactccaagtccatgacctagcacaattgcacccacaatataggcaaatattcgaaacatgcggacaggaaataggcgcacgtagaagaggaggatcgaaaccttagcgggcgctatagtgaaaggaaaatcgaggatttggtttgcgtagagaccctggataaaaccgattagacattgctgagagcttctcaagtcaaattatgacaaactttttgtaagataaccaattttgaaggagttcgcgcgacatattcgaggtgataaccgactcctccccgcttgaccactgtacatcgtgatatcagtatccgatcgccaatatactgtaggaaggtgcgtacaatagatatagagtgccgattgtgctaaactagcaatctgtttttcttgttagcattgtgcaggttcacgaggtttgaatataggtggcgattcataccaacgctgggatcattaaatagtcatcgattccgtttgctactcgctgtacatgcctagtgtaaaaacgggccccgacgataatgatttgaatggcagcaatagcaattgagacaccaatgagttgttgtccgcaatatgcgacagtgccagtactctctgccattgttgatcaagcgttcaacatgtcgcttgcgagtattcaaggcattgcttgaccaattggctaggtcgaatttttttcacgagaaaacgtagaactcacacttaccccagagcaaaatgaatcggccaatataagttgccttgcttactttttggtcatatacttggcctcgagttagtgggttgattagggatttatattaaggtgtcatcataatgattggggccaaaacaggttacgtattgatttttagaactgtaacaaattaacaatcctgctaagcgagatgcgctctttgaattttgggagagtgatatatgctttgccctttgactctaccatcacaaatcttgaaagcacttttgatttcacaatggcattcgcatcggacggcgtgttgaggagaacccatcgcgctatcgagagcctagaacacggctacccaacacttccactatgtttaggtttcaactattcctatcacatcgttaattatgctattgtgctccatattgctaacaatgctgcttctaagaggccgagcactcgaaatcctttacaacatatcttccaactccaccgtgaaacctgattgaaacctgccgaaggaaattcaagcgtaactcgacaataaccagactggctagttagagcctctttatcagagttttctatagacggcagtatattgtaggcaataaatgcaaattcaatttctcgtataaagcaatcggggcataaaataatcccagatctcggccacactagttcatcgagtggacctgcttgcttgagcacggttcacacggttcacacaacgggatctcaaggcccatatttgtcggagagcccgccccgtgtacggagtatgtagcgtttatgtactccacgggataacttgaatgctctaagatatcctttcgggaaattctagaatttctacgacaccgcaagaaaatccatcatgacccaggatatggacacatctctctcggcacagatcgctgctttggccgatagcgcgcagactcgaggcctcgatgagcaagcacgttcagaagcactcaatgctgctcggcgtttggtagctgctttggagtcacccgttgagagaattattcaggatgtagtgatggtatgttttatgtccgagacttcaattcacagcccctcattgcagtcttacgatgtggcttttgaattaactaattctgaatttacagcactccccagctttgatggctattcgtatgggtgttcagctgggaatttttactcagatcagccaaaagccagaaggcggcgcttcatctccggagatcgcagagaactccggtgcaagcttggttcttgttggtaagattggcctatccgaccgtcgtttatcaatgaattccgccattcccctacattaacataaaattatcatattcagcatgaaattatacttgcaatagactaaatatctaatataaattctctcaagaccagattactcggcttctcgccgcgacgggatatatcaagcaggatggagtacaacacttcaagccctcgcctcttaccatggtgatggcagacccagtcatggaagcaaccactcgagcctggtcagtgcaatttttgatttttttcccatctatgctcctaatcggctgaagcttttattgacaacacgtagctttgagatcggcaacctttgcacttccaaagcaccagagttcttccgcaaaaacaataatcaattccctagttctgccaaggacacgcctttccaactaggatttaacaccgatatgaactatttcgagtggctgggccacaatcccgatctggccaaggatttccagcaatggatgacactaaagcagaagactaccattaactgggttgactggtttgacattcagcgatcaatcattgatggctccagtggcaagcctgaggatgtccttctcgttgatgttggaggtggcgaagggcattatctacggcaattccgcgagaaattccccgagacacctggccgtttgatcctacaagatctgccgcaggtagtttcgaccgttgagaatctcccggaaggtatagaattgacgccgcacgactttttcactcctcaaacagtcaagggtgtgtaatgctagaattgcatagttatcgtgcttgtgctaatgattgtcaaataggcgcgcgggcatacttcatgcactggattcttcatgactggtcggacgagcactgccgatccatcctggctaatattgtcgatgctatggagcctggttactctcgtctgatcatccacgagtccatcctcccggacctccactgcgatctgccgtctgcttgtctgagcgttatgatgatggtccaggttgctgcgtttgagcgatctgagaaacaatggagggatcttcttgcgtctgtgggactgacgaaagtcaccttctaccagcctcctggaagtggcgaaggtattgttgaggcttttaaatgatttagggggtatgaggcctggtattggctcaaaccggggtgacaggggtgacagtcaggagtaggtttcctctcacttgactgatttaggtataagggagtgggtgagggggaaaagagaacgtagggacaaactgagtgagaaatgaaggcgaggagtgagccaatagctgcagcgctctcaccctaaagtgatcttatacttttattaatccctgggagtgctagaagacttgatccaggatataaatactttaaaatagatggccataagtggcgccattttcagccgcctatctgccacttgctgtcgctcaccgtgccccctgcactcacgcacggtgaatttaacacgccgcagtagcttcgtatacacccgtcgccagattatctctcgtcacgagctggagaagagcatcaaagacgctcaacatcacccaacaaccactggacatgacgataagacattcggccttgatcctgggattgtcgatgacccgcttggaaggtttccgcaaacatcagaccacgttcatagtgctggactcccatcaacccctgtggaccatccaaaccgccataatcgtcttgggcagtgaagaccggagcgtattgcaagtcggacgtgtcaatagtaatgggagtggtgggacgagtctggaaacccagctcgccattccaggtcatgttctggatcgccagcaacgttccattcgtgatgatcagatagtcccaatctccattcgagatcaagacccgattagtcgcctcgatcagtcgcggcaggacatgctctgtgggattcgcagactcgtcgtactgttgctcgggccccgggttgacgcccacaaagacgctttcgatgctacagagctcccagtcgatatcgagaggaacatgcagagcgctcttcacatccgtgcggttgaaataggttgagggaccgggttgataggcaaggtctgtggggaagcccaggacatcccataagagtggacatgtctggctgaccttgtaaggactccaacatgggttcggattataagcttcgaaataaatcatgttgtagatgtcgcactcggagtagttcatttgtttggagggttgcactccagaggccggataggtgaaatactcctcgaagtattccttgtaaccgcattcttcgtaggtagcttgcagctcccccatgtacgattggttaaagttgaagagctcggcatgttgttcaacgaaggggtaggaggggagttcggcctggatataatcccactggccgatgcacgcatcatacatcagggctcctagtatgggatgagtatgtgcgaccgatataatgcagattcagggggattctcaagtcttaccgctgaggttgaagtactcggtatcattcttgtcgagcatggcggcggatatgaagggcacgtaccggcccgcataactctcaccagttaagaagattcgaaagttcttaataccgtatgttttttggaactcttggaaaaagttgacgaaatcggcagcgatgtcctcctcgtcggttgcagtcggcgtgccgtttgagaacccaactccaaccggttggtcgaccctaaacacctgtcagcttatcaagtacatcctcgggtctgcacacaaagaaaccattttactaatgacgtaccataacatattggttaaattaacccatgagtactcattgatgacaggttcgtaggtaccaggttgccaggtgaagcgcccgttctcctgcagaaacccctgcattgaactacatcccggtccaccattcagccaaattgtaaggtcgtcgcttggttccccgatcttcggctggaatatgtagaacaaggaggcatcgtcacggacagggataaaccccgagtacatctctcccaaatcgaaattaacgtccggtagactctccacgacatgggctgtggaaacattatttgtcagccgtggttgaaggaatgggtaaaggattggagtaaagcatacatttagtctcgttagttaaaaatcgatagtttgagggatcaattggttcagactgctgggtaggacgcgtagaagggcctcgagtcggctgtcgtgcttcgttgccattgatcagcagtgcgatcgccagaactgctgagatcgatcgaccgaacatccttgcagttcccttatacggagtagagatcgagtgttcgcaatgcaaaatgtcaatcggcccacttgggtagagctaaggagaggctatgtactcttatacccctatatgccggcttctctcgtgtttgcatgacaaacacgctttggtatttcttccgagatccttcgatatgagatccacttttcaagggatcagccgtgctaataaaattagcggctgttgatcacgaacagaccctcttttgcccacttctctccactttttgcattttaggtaagtgtcgtccggaaatgagattcttaatgggtattagcatcaaacgctagaataccaatgattcattgtggtatatactaagtctcgtagcacatctagttctaatgtattaggaacattgttatgtattcgagtgtacatatactacagcataagccaattaccatattgtattagataaattgttaataaccctaagcttaaacaagcaatcaagcaaaagccaattcgcgtataaatggattaattaccttttatgcaatattattggtcaatgaaagcggttcccctgttccttctccatatctgacccacctgtgttttgaacccggggattaacttacggggtttaacttacagatccccggcagttctttcccaatttaccaagggaatgagtctactatgtaactactaaagcgatataggtgcacgaaatcagtagttgggaatgacattggtacctagacagctacaccactatatagctacagtacttcttccttgtatccgcggagatggctacaaacaggcgaccgggggccggcggaagcgcagtgccttgcatatcgaataatactaccgtatgtattagaatacaacagtctatacgaagagatctaatcagattgtttagcttataattagcatagtacttggctaattcggtttttgttacatattgaaagcaagttaatgtttcgaaagcgttctcacctcgcaatggatacatcgtaggaccgagaaataacttctaacttagcatctagattgcgtaccatgaagttgtataatacagaagagaatattcgagcaactccacataacacgaaacagaggttcaaccgtaggacgaagcttaattagggaatattcggtagatctctgcgctactggaaatgaattccacacgcgtacgcaggacacagactattgtatggaccttgggggaacaacttggaataggtccactattattaatgctttgctaatcgattccaagccttggaaattccaaagtagacgtttaatatttattggtaccttaaaacctgattatgatattgatgcggcatatacggagtacggagtacggaatgctaattttccatctgggcatctttaagcgggccgttgtcggatctgataaaaagagaggggcaaccatgcttcatatagtgcacaaagactttagcatagtactccgtacatatcatcgatgttcagaagccccttttttcataactaatttaaaacccgactgattgcattctatgccctactgccactgataccagttccatggtataccttagcagtttcgacactcattttgcagtatctttaataggggcgagctgaggagtgtattagggttatctttgagctgaatccacgtgactgaatgtcagctttctatccatgattcatacagagtgtccgtgctttgtacaacatacttggattcagcatattctccgtatagatgaaacttgcggccccggagttgcccgcggccgaggtttcggggcttcgggtcggagcaagggtatttaccagatataaagtgacaagtggtagtagaaggcgaggtgcgttatagagcttatggttatcacggggtctgaagatgcttaattaacttgttcattataatgagagtgctgctctggtataaggattaaagaggtgccaagatataggcaaagaaatttgcaaagtctaagtgtgtgtattaaagatcgctaacaaccggtaaagaaaattctgcactgcctccacgagggtggttatttttcattttttatgggtcttctttatttacatggaattatatttcgatgactacccaggtgaactcagcattcaagacatcaaacagttcctgtcagcttttcgctaagttgtgttgattcattagcgttataattaatttcttcaaatccgagaaagaagagaagacttaatcaaagtaataggccgataaccttgttgtcttcttcaacagacaagaaccgaatggtcataacccaggtatattcaagactaaatcgggcgttggagactaagagcaatctgcatgtttgttcttctccgagccaccatcatgatgttcctgagttgtataattgatttactacaacataagctgtgcgtggaaattcagctctaaagcgattagtttccaacaggcagtgaagccgaggaagccacgtaacccgattcttcatagtgagctctatcaccctcctgttctccaccttttattcgcccttgttagttcttctctccattgctgctctaaaacaagagggggccaaatgagagtcgaatgatagtagatcggagagctcttgcccaggatcagcaacggctgtccgaaacgaaatttcacctgttggcttagggagagaatgagacgaaggcgggttagcaatttcggtcctgggtgggagctgtgcaaccattatgccagtgctagtgctacatggtggcaagcgggaagcgttgtatacttgctgtcgaaacattatgaagtcattcgttttgggcatggttcataatttctgtaccttgggcgaaagatctgagtttcctccaaaaaggaattcgcaaacacaaatcacctaggtacgtcctacggcttggatctgaacgatatcccgggaaccatcttcgatcttgaggctgatatctcgtttgctcgctcatagcaactcaacttttgatggttgtgagtaagcgggtgaagagaagcataactagttaaaataaagtgagggccaagtgaaagtgtttgaggtcacgtggcctctcgggcatgcttgaattggggactgctttcgccgtgaccgccttcgggcaggacattcatagaaaaagacatcttaaggaatagccgtctgatcatccctccctgaccccatatctcggtaagacggctacaagcacctaccggaggatctgcgtcttcattttgtttccatcggatttgagagaacttccatctcggacttcgctgagacttgaggacatacagattcctcctgcccgttagaatagttccaagtagagcattcaaatgtctacaagagtgctgaccctactggtaggtgtgggtcagacttcggtctgtcagatttggtgaccgacgctgggatttcctgaccctaggagagaccctgatcctctgtgaaagaggaactcattgccaaacagcgcgatatcatctttgaatggacagataatcatcgtctcgtccaacgagtccctcgaaaccgctgcagctggaagacatctggcacctagctgctcagcattgtgctcggcggatattgcccatctggcagatactgcatacttcagcgaggtacggcaggagctccatgggaccgtgattgccgattcgagcgcgccttcccctcagtcaacactctcaacaagtacgaccggtagtttctcttctcctcctcaggcaaatcgatattttccagagcacacgcattcttcacgcagtactcttcggatgtctccaatacaactacatcgcaggcaaaacaaccccagctttagtggttgccgaccagccagcctgttgcatagtcgatcgctgtgatgatctaacgattgccgttcagagtgggcggcatccgcctgttcggacgatggggaattgatctcatcggccgcttaccgaccactccgaacggcaatcgttagatcaccacggcgatcgactatgcaacaggctggccggtcgcccgtgcagtcccggacgcaacagaagaggttctcacggaatttctttaccgcgatgtctacgcacattacagagccttcaacgaattgctctccgataatggcccgaacctcttgtccggcgcagtacgacactttgcgggcttgctgaaagctcgccaccgtacaaccactccatataatccccgcactaatgggaaagtagaaaatttcaatggtttaatcggtcgcacgctcacgaaataccttatgggggaacccacgcgcgtgtgggacgagttcctcacgaaagcagcgcaatttatttcaatatttgagtgtaagaaggaaggagcccgggaagaatggtatagcgatttcgccaagcgagctcaaactgaggacgtgggtcatcctgttgattggctgcggactttatacacgaggatcagtgtgcaatatatggtattcgaaatggaagatctttaggtaactgcagataagatggaaaaagaccgggtggctgcagaacagttgggagaggagaggccaaaagccgttgtcccaccgtctatctttgatgtaccctgggctatgggccgttaaacagtggactagttgatatagtctggctattgatactcgttgagattgtttctgcctcagataggaggacttcgctccctgactgtttgatcttcctagcagttagctcgatacaacccacggttttctttgcctgaggttttataccagtggagcttgaaacccggtagtgagacaggtcaaaatttactgtaggaaaatccgatatggtgcactgaaggtgtattaagaattcactaatctgcagtaataagaagtcagagccgaccccataagagtccgtcttcttcttcttcttttttttttttgagttttcttcatttacaagcgtatcttcatgaataaattccaatgtcacagctcaaatctcctcaatgacatccttcagtacatcgaaaagctcaccggcctgcttctcattaccgagctataggatcattcaatgttagtattataatcatcaaatcagaaaactgagaaaaatcgaggaagataagacttacccggagaagatggctcacaaccttgtcatcttcattgctggcgagatagatatcccgagtggatgggcgaaaacccttgatatcaccaaagggcatggtcttccaaattgcactgttcatcataacacgcaaggcaccatcggcgcgcatgataacgcggccggatttctttccatcgggctccgtcttgaggttaaccttgaaggtgccggtaccacgctccttccatttcttgtcatcaaagtagtacagcttgcccttggctgtaaactcggtggtctcattttcttcgccggtttcaactttgtcatggggtgagcgactgtccatcttcggggtgctggggggcaaggggggatccataccagtttgtgcgtggaatcgctcgtcggtcttctcggcgacaaaggtgtcatcgggtccgcccgctggttccttgtcactttcttccttgtcgggttgttttgcaccgagggtcttttcactgggctcgccaaaagaaacgggggcattaggagacgcgaaactggtgagtttaccagccgttccaagaaaaccgacgggagcgtttgccgatgcgaaactggtgagattaccagctgttccagagaaactggcaggggcgtttgcagatgcgaaactggtcaatttaccagctgtcccagggaaagcggcgggggcattgggagatgcgaaactggtgagtttaccagagggagcagggaaagcgctgccaaatgcagagaagccggatccgagggcaccgaaaccagcagttgaggcaggaccggttgaagcatcagatggtttatttgcaggcattgcaaagggtgaaggtgaggtagcagcctttccgaatgcactcgtagtgaaagtctgttaggaactagtgttagtggaagacgaagaaaagaaaaacttgcggaagatgaggtagccaactcacctggtccaccttggccttgcgctcctccgaattgtcacgaggtctcttcttctcgggttgtccttcggtgatggatttttcgtctgatgaagttgtctcagtcaagccaggcgtggggtcagtcgcagcgtgggaattctgtgagacgtcatcttcaagttgttctcggctccgtttcttcttgagggtttgtgaagaatcatcctcgtttccgccggcggtcgattcaagattctgtgggaattgagagtggttagaatcaggaagtccaagcgtgggtctagggtaataggggtgcgttggactgtatgggacaggacgcggagagggagagggtgagggtgaacggtagtcaggtagagagggcgagggagaagagtagtcaggcagagagtcttcatctccaattgactcggggttttgagttgtgtgagatggagaatcatcatgtatgtaggattcagatgaagggtgggaagggttctcgagagaagggtgcacaatagagggcgacccaggggaagggtgtccgggggaagggtgtccgggggaaggttgtccgggggaagggtgtccgggggcagggtgtccgggggaagggtgtccaggggcagggtgtccagggaaagggcttccagatgaaggaataggctttgcagaaggaatggtgtcacggatttcggaggattcgccttcagcggatctcgaagtcgaggaagccaaggtgaccgctccagttgtcaccttgataccaacctcaacaggaatggtcaaatggctaacttgctcggatccgccaaatgagaccttgatctcaagctccaagggaaattggatcttggtctcggtgatgaggctcatgatcgggttgtgggacaagggtgtattgcgaaccgcaatgttcgcggatgatgtggccagcacatcgtcactcacatcttgggtagtggcatccttgggtaattcggcgtgattggagttgtcttcactgtcagcggtgttcggagtacactctcgggatcgcttggctgggggtgtgtcgtttgcaccatctgtgttgtcgaggtagcgctttcggtttgcacgtgcagaatcgttgtttccaccaacagcatcgaggttagtctccttgagctgctgtcgcacggggcgttcgccgctatcattgtcggaggggggcgactgcgcggtcactatcaagattgtcagatcacatgaacttcggagaaagccctacggcagaaagggtattgcagatataagtaaaagctgcagaacggagcaaagaccgatcgattaaaacgtacctctgtggtccattttcagttgctccgtttccaaagctttggaggttgtcagcgaaactgcccaagtatgtgggggaggctatgcgcccaagcgctgatcacataccacctgtggagaagttctgctcgctagaagcagaagccatggcgtcacgtcctatagacaagcttgtcaaggatattggtattggattccagatatccggtcgagattgagttgggcggagcttaaaccaggtcacgataactgcagataaccggttcggatcgattgggaccagccgaatcgacgaaggatggaagatttgaagtttgcgaactttgcgaacagaagaacgagaggatggaagggtggaaaggtgagagaagaaggaaaatctagcttgccggttcttataagttgaccgccgggtgcggggcccaacaaacgggttctctgaatagcaaagcgtcaatggaaatggaaacaaagcatattcatctaaatagacaattgtctattgttgcctggtgcctgggcagatacaattcgcataaattcaattcagagtctggatataccggtatccgcgctattctaatacaattcaatgttattattgaggttgcgccgatgcctatcagaggcatgtgacggcgcattgtctcaactcccaagcacaatatcacaatagagagccttaactgatgaaacagagacacccgatcgcaatgtagaacacaaacagcgggtacactgcgatgccgactcggttccgcaccactcccgagcctcccaagatgcttactccggctgctaaagaccatgcgactaatacaagatatactggtatccgtgcaatggtaggaagtcctaacgcactcagcatcgcggcgatgaccaaggggaagagcgtatatccgataatgcaaatcgactggaaaaaggaactaacacgcccaggccgcaatgttagtagactgcgatgttgggagatgattcgtagaaaacttacatcttgccaccaagaagcttgatctgaagagtcacagcagcttctccgatccagacaagacagaaaacgcccgagaaaaccaccgacgactgatcaccctttgcgacggacaagaacaaactcaggaccaggcaaaagacaagcggtcccctagagtacttattagtatttttcagacttcccgtgtgtaaattcgcttaccagagatcccagtcccgcaacccatcgctcatgccaccctgcaggaccacgtcggcatccggccagcgtccaacgagtccccgaatgttaccaccaaatccagacactccaccttgctcggaatcagcggtaccactgcccccgcgctgcatcattcctccgagcaagtacttcggccaaagcacctggcgcatcttctcccacacggcaaccaagtcgcgtgacaatgtctcccaaacactctcatcgatggtattttgcactgcacggcgatcctcaccaccgatagaggacgttagatagttgccatagccagaggaattgcctcggttggccgagctggattcgatgttgcctcgcagaggggccgtgtcggaggtattgtgcagggggtcgtcagcgtcgatggctagaatcacaccgaattaggatcttgcggatacagtggtaatcaagagggcaaagaaaaatactcaccatcatcggcttcgatcaaatcatcaccaaggagagactcgtcatcatggggctcatcatggggatggccttggtatacggtagccatggttcgcgtggtatggtcgtgatggtcggaagtttaccgcaagaatggcacttcctttagttttagtcctctcagaggcgaagtcaacaggaaaggtcaaggtaatcggggagtatgaaagcaagttagccaagctgtcccggaaaggctagagtggcattacgtactgggtcacgggtaatgttaccaggcacgttatgtttcagcttttacttctacgatgcacttgcatgcatattatgggctttctgatttgaatgtttcaactgccttgaatctccaaaaataaaatgatcatccgatgtcattaatttgacaatcaattttcctcggtatcagcaacataaggcgcctcctcctgatacacatcgtacttgtacttgcttccgatatggtcagccctgagctctttctgtcccttgccatatatcctctcacgggctgtgagagctggctctgaggggtctggaagttcaggataaagaccgcgccgcctcagctccgggatgagcaggtcaaccacatcctcaaaggtgccaggcgtggtaacatatgcaagattgaacccatcgaggtcagcctcttgtatccaacgctccatctcatcggcaacagtagccgggcttccaatagctaccgggccgagaccaccgattgcagccttctcggcaaccacgcgaggcgtccagcgtggaatatccttgctagtcgtggtcaatgcgtcaagcaagctagtgactttgtttgcctccaacgagtctaaagccgtgatgtcttggtccaatgggattttggaaatgtcaatgcccgtccatccgctgaaaagaaccagtcctccaatcaccgacgcgtatttcttcagctcctcgtacttcgcccacgcctcttcgtcggtcttgcctacaatgggcgtaaaggtaccgaagaacttgattgactgtggatcacggcctcgttctgcggctagcttgcggatgttgtcgaccttcggcctcaacacctctggcgaatgggaagagacaaagatcgcctcagcgtgtgtcgaagcaaaatccgatcctgcaggtgaagtccctgcctggaaaaggaacggcgtccgctgcggagacgggtcgacgatgtgtcgtgtgcttaatgagaagtacttgcccttgtgattgatctgacggaccttatccgggtctatgtacgagtctgtttcggggttgggcgacagtgcatcaggagcccaggaactttcccacagtctataagcaacaaccgccgagtcagtcttccacggcatcactaaccaagcttttgacatgcaactcacttatagagcaccttcaaatactcatctgcctggcgataccgttcgtcatgctcaattggagtatccacaccaatggctttgaaagccgctttcttatatgaggtcacgatgttccaacccaatcgaccattggtcaaatggtccagggttgaaaagcgcttagccagcaaaaagggctgctcgaatgaagttgaggccgtgatgccaaacgccagattctttgtcactgcagccattgctgaaatgggctaaccagaagtcagagtctgatcggaatatttggtttattgatactcacaatagtcgggtctgtcaccggccattgcgccgcacgccgaatacactcgtctagtttgccctcataggtatcatgacctccagttgtatctgccaggaacaatgcattgattccgccgcgctccaagagtttcgccaactctatccagtacccgagagttcgcttggtcgcagacttgtccttgggattctatggagctgtcagcattccggcccttcaccttcgattcctataccaaccttccattgtccaggcgacagatgtcccacggtcgacatatcaaaagcgttaagcaagatttgtttcttgccattgccaacggccgagccattctggctagcagttgcactgtcacccatgattcgtagttttcaaggtgaaatatgcttcctttctttcctacgggcagtacttgctcgcgcaagttcgaagcggatcggacgatggtctataagagtgagacgacccctcatgttccaaaccaacaaagcccggaaggacggctctgtccaggggtactacccccaccatcctaacacagaattcgcccatcgacgacgtatctcgcgccatcgacaatgcaaaagaggggaacggcaagcctccgagccctaacaggttggattcttagagctgcatatggcgtgccgtagaccagaacattcgccatcatctccacattaatcacattatcttgtagatatctttaacctccgaatgataatgccggcataagtcatgagagcctatcggaccatttttctcagcgcgatatcagtattaaggacaaaggatagcacgttagagggaagaatttcatcatcggctgtcagattgcgtgacattttcctcgtcaacacccgacttcgcagattattacatattatgttccatttcaaccttgggactggtctttgttatctaaattaagggatagaaatgaccggataatagccggaacgatgatattcgaatgtcgtatgacttagcagtttatataggggagtgtaaaaggctcggcggttttctggtgaaaaggtccgttggtagtagacctacctaccttagtattggccggagaatatatttcaattcttcgtttctcattgggggcttatccaatatcggtatgtctttcattattacacttaatctattcctagccatgatcttctgtaggcttcttaccaaagtcaaggcgactggcataacgaagactcaaggacaaggatcattacaagttgacagcaatatcaaacccctgtggaatcttgattatcgtctcatgttagaagtagagaatgtacccatggtattatgtacaataatgcaaatatgcaacgccatctatatcccccaatgtgtgatatacaaacataatacaatcgaggcctcagcctcgtcctgtcaaaggccacaaatataatcgtgcttctcacaaggaaggttcctcttgcgagtccgcactttcttgctctcgagagttgcgagcctcccactggaattttttgatgcgttcccgggcctcctccttctgctgaatcgtcgggtatactttcttcctcttccaagccgcaatgacgtccttgtcggaatacttcttcagcatcttcgagtcggcgtcaagggccttgcgctcggccttcgaaacataaggcttgtagtcaaggttcagggtgtcgtcaaccaccaaacgaacccgcgacatgatcttcacagccgccggcccggcgacggaatccgaaagcgtgttctggagggcactccagcgagtcttcgactcgggttttccattctccattgcctcgtgcagttggagaatatatggccgtaacgtggcgatagcagctagtctcagcttcgcttgtagctttctgcccatctcatgtagtttgggggctttggtggatttggagtcttctgtgtcgagtcctctgaggtgcaggagaacggacgagttggcggaaaggatctggatcgtttccagatagccctcgaggacgcgaatgtcaggtaggatcaatgctttgtccatcaaaccgaccagctcgttcgcatgttggagaactgagtggttgcggcgatcacggcggcagacactgagagcgacgtggaatgctgttccggttgcttggcccgagggaaccatctgctcccgcatggttttcacactgattttgctggagcgagagatgcggaggaggcggaaatattggatgtaggtgaaggtatcggggtcaatgcggtaatcgtggtcctccaaagtcatatgtttccagtaggcctgtccaccctcagatccttgagtcatggtgaagcatgcgtttaggataagcgtcaattccttgctgtcgggtttaaggaatgatagctcctccgcctggggaacaacaggtttgaagagttctgagaagtcttcctcttcctcctcttcctcctcttgcacttcttcctccgccttctcctcctccacttcttccaatgcttccatcaactcttgttcaacctccacggccgatttgaaattttcgattggtcgattgttctcgtctacgaacggaacatcttccaattctgattgccgcgtagcctctgagacttcaagggcttgagtttgctcgggagttatcctgcgacgggtcgtcttctcgttctcaataggtcgtttttgcagtatagggatccccatggtttgcttgtacaattccatgacattgtaacaatcaatatcactaccgccttccagaagcaagctggccatgccgttaacaagttcattgtcaatttccaaggttcggttcttccaccgccagatgacatcggcccaaatccgcttgccttcagtaataacctgggccttccgttcaagaatctgctcaatctcatcaggagaccttttctgtatatctctgcgagctgcgaattggacagcgttcaagatgatggtgtaggtggtagcatccggggcacctgggccctcttcgggtaattcaccggcaattttccacaggcgatccatatcccaatgacgatggcagactgtaagcatagcgttggtgtgtatgatatcaagcttgactccagagttcggcgagccaatcgagcggtagacagaggcggcagttttggcaacacccaatgacctcggggctgcgctgaagcccttcaacatgattgtgtatgttcggggagttggtctcctgccacgttttttcatctatgagagaaagtctgtcagaatacaagtccgaacctcaatctcgggcaccaccgaacaaaactcacatcattgtaaaacttgaacgcagcctgcgggtgattttgatccatgcaatattgcagcagatgattccaggcaacatcacatctcaagccctgctttgttccagcacgaaccaaggccgccgccagggccggattaccactgtgcaaaatgcgcgcgacccgatccgccattttgcgagggtcgttcaaccatttcaactcctcgttgataatcttgggtgtgagcttgggcattcctctaggcgggccacgataagtgtcctcgggagcctcgccatcggcctcaatgtcggcctcaatgtcggcctcaccatcttgttcttcggatgccttgtcatcagaggcgcgattctcccgaacctcgccttcatcatctccataatcatacggatcattctccaattcctcgcgttcggcagtctctggatccagagccttgctttcggaagtttcgagctcactgttgtaccgcccggtaaacgaacccgacgcaatagccatcaacatgtcatgctcctccctagacttgacatcctgaaccacccgcctgttatcatgccgacttttaaaatgtttatcgccaacatgtcctatgcggcgagtatcgcgatctctatcggaggagcggttgggataggaggaggagttatagcggcggtagttactggacgcgatccatgtctgtggcagtcgttgggatgcagtagtagcacggtattgctgtgcggtgagcagtcggctgcgcaaagctctgttcacgagcgaccccggaaaccgaaatgtcatgaccgggttactgatctccaggtggaaagcttgtgtcctgcacaatgctataagggagacacggattcaacaggagcgaaatggcaaaatggaaaacacgaagaacagattgttatttcctcatcgcgtgttggagatggtccgctaaacaatttcgcagattatccggccgctagttcatatcgggtctaggcttaatgtctgtatattcaggcatcaattattcctgcctaaggtgtcattcaaccattgatacctcaggtttcttcgaggtccaactagactgcaagtggtttagttcccattccttcaacccatgttccctgcgggcctcgacgggagcgctagagcacatttcccagagtcttctgtgcgtttaaggacttgactagtttactagttcccttggatcggcgttaacatctggacttagcacatgcgctgatccgtggatgaagatatacttccctaccttaaatcaacctatgaagtggacgtaaagcttcatagcactatcacattctctctctcattcattttctattattggatcctcccatccgacgctaccgagccttcattccaagtatacatacatcatcgaacatgatctgaaaatcaaacaccatattcatagtatacccatgcacatcactcactacatcctacccagccatcctcctaagttctaacccaaccggaccataataaacacgacatgcacagcctacctacttgaagtatcacacgacactagtcagaagctaaaaacaacctaactagtggagtccaacagaaacagactacataagcactagccaagtaactaagcaatgtgacatgttaactaactagcacgcggctaggcaggaagaagaagtaagctagaaacgactaggaataactctaaaagcaaaattaccaccagtctcccccacgatgatatcggtggctgatactaacgtccaacacgtggagacgctttactgtagtaagttagttagttagttcctagcttcgtgtcctgtgtatgatgtatgatgtatgtatgttgtacaggccacatatacttgtcttattcggttctagtcaggtaaggtactgtgcgcatgtgtacatatgcagtagttgccagtgcgtacgcacatcaaacggctttgcatggtattgtgctcggtccacggtaagtgccggtactgcttagtgctgatttgggttaggcgtagattgccccgggatgcttgcagtggttcgttattgccaggagtgatttattttgtgtataatactgaggcctgtttgattctctcggctatatgtgcctttttcttataccagtaatgcttttgtttttttttctattttttctcttgcatcatgactatactagcctgcatttgacatttgaactagttagttactaaaaatgtgacatcctttacataaacaattttgagcatcaagacagcgagaatagtgacatttaagctgattgcaaaatgcactagagaggggaaaggacaaaaataaataatacacatcaggttggatgagtccgtggagcataatgtacgttataaaacgaaattgaagaaaaagagagaggagtgaagcgaacacttgcatgtagcaaggttaacacggataagagggaacgggaaacaagactagaacaaagaaccccaggaaaacgattttgggagaatgctgtcgataataaacagatgcaaataatccgccgcccaacccatcgttggagccacgacccaggtaaacgggcaaacaagataagacatacaccacttccgcatcagatttcaagtaggaaatagaacatagagagggtacaaaagggcgccaagccctctcggctcgatgcactctaacacaaaaaggatgacaggtatagaacaaagctggaaaagccactcttagacagatcgggaataaaagccgcagaggttggtatcatagcacgaaagactcgggagcggaagaatggggggtgttgggaatgggaatcggaatccaggacgagaacattagtcaaggacaggggatatcgtgataagaaagaaaaagcaaatgcatttccgtccgtgtaggtccatagcggaagaggtgattatgtgggaaatattattgcggatagtgggcggattgagtctctggaagctgtagcgaatttatggatctgtggacaggacaggtcgaggatgacctagtccagagggtcgatcctggtataaagaaatggcaacgacattactcacgttgcgggtaccccggtccgctctggtagggagagtgagggtagttgggagggtaggctatctgtgcattactctgatagaccataccgctgccaggaggaccaccgtactggccggggacctggctgtctgcgggctggtacccgatcggagggagttgagggcgaactccaccagcgtaaggaggcggctgtccgtgggatgggtcagaggggttcggaggttcgacctggttggcctgggcggcctggacggcagcacgctcacgctcctcgatagccttgcgctgagcatcttcctccttcttgcgagccttccactccttgcggatttccttgaattctaagagagcaaagtcagcagtgagcttaataatgatcagtttccaaaatgggaaatagcgtggacgatgctggctagtgccgggacggaaagggataagaggcaagcttagcctccacgccgtcggccacgctactgcgggccccgcgacacctagtgtaactcactagcgtccgacggcgggcgctaacccgatctagccatttgcgacaagattcaagatctccgtcgcattgaccagcaaaagtctaaaagcaaagaaaaaatgacatgaacttaccctcaggagtacgcttggcgccatgcgattgcatagtcacgtgtgcattcaaatggtttagagtaccatatgccttttcacatccgttccatccacacttatacatgcgctcaatttcctcgtaacgacgacgagggcgcttatgctgctgtgcgccagggattgggacaaaagaatagacctagagtaaaacttcgaatcagctctgatcaaattcaaattccaagccacccaatcttatccccagaaggaagcggttgaggggtagagcacgcggtttttgacgatccctatgacggcggttcatggaccgcatagtcaaaactcagagggcatccaagacaacaatggttgaacaatgtgacaaggcttcagaaatccccccgggaatcatcaaaaacatacctttggagagcgcggccccttgagtacaccaacaggagaggtggaaccaaccgttgtggccggggaagcataaggtcccggcaatccatgatgctgttgtccatagctatgaggccaatccggacgtgcgtacatatgctgaggcggaggtgggtgaccctggtactgcgccatctcatgcccctgaggttgataaggagagtagggaggaggataggtggggctgttggccggaagcgaaggatctataggaacgggcgcgtcagactttgagtgcggactgcgcgggcccgtaggcaaggtgttggtgaacggacttgttgcttgagccatacctggcgcaccgccgggttgggagttgggggcgtaggactgaggaggccggtgaaggtaatcctggtagccaggcgagcgggcggtgggcggagggttcagaccgtagtccgactgaggggtgttggccgacgaaatattggcgggtcgaacctcaggctgcggtgtatactgcggcgtggggcgggcctcgggttgcggggtgtagtgagcagcagcagcagaagtttgttctgcgggtttttgttcagaaggtgcgtcggtgacggcgtttgggtggtgcgaacctggctgtgcgtactcggaagcgggccggttgtccataaaagagaggattcgcgcgcaaagatgccgacgaatctatccagggagatttttcggtttagacctgtggttgaagacgcgtcaacacaacaatgggtcttggggggnnnnnnnnnnnnnnnnnnnnnnnnnnnnnnnnnnnnnnnnnnnnnnnnnnnnnnnnnnnnnnnnnnnnnnnnnnnnnnnnnnnnnnnnnnnnnnnnnnnnnnnnnnnnnnnnnnnggggggggggaagttggggaaattgacgagtcggtccgacacgttccaagcaaggggacgggaagactagactaggttgccacgttgggatcgtggctaacctcttcggacttaggagattggctcacgtacctggtccggttcaatccctggggaattgagatgggatgaagttgcgacgcgaaacactgatcgaacaggtttgcgcacagatgctttcgagataagagatctgaaagacaagggacgatcaattcacaacattcaaaatattggcaattcggatttcgagcgcgtagctgcaaaaaggtccaagagatggaaaagatcaaaaagatcaaaaaagaaggttgatatatcaagattgatgcttaatccttagttcgaggatgccttgcaggtggcggtaagcacgaggcaccggaggcggaaaaatagccacgggagatactaacgaaaactagagactaaagagaaaaaaagtcaggagtcaacgcgacttggagcggcctaaaaggtaaagacgattaggagaaaggaaaggcagtcctcgtgggatccgaggatgctgtggatccgctgggtggaccgcgtaattttggttggcgatatcgttggtcggtatggaaaaattacatcttttatgtttttggatttggtatttctttttggaatatattcaatattgaatattggatctcttggggcacctggaaggataatctacgatgtatatgtatatatataaagcatattggaacatttgcttcaaagagaaaaagaggaaaagaaaagaaaagaaaagaattaaataatttactttctgatctcggaccattccctttttccacacaatactccgatatttaactggcttggccccctttcccctcagtgtcttccttaccggctaagctttccatgtccgtgtgataacacctttttctttttctttttttctttttagtttccagtttttggtttggaaaagaaagaaagaaaaaaaaaagcggaacccatccaagagaaaagtggcaacttgtttctcgcaaaattcttcaatcattcatacaaaaatcctgactatgaatggaagatcaaaaaatggatgtatacaggtgttgttgttttttgctaagggctactggttaggttcccaactggaggcctcttagtctacccgcaactcgggtgcgtcgagggagaacctagcgtgtatggcccgtgggtaccaaccaagatgtcagagaggagccaggggagggcttgagcctgaccaaggtgggcgctaggaatggcgtgcccgaggaacctcaaccgagcgatggaatccaggctcaaaggggtatagagggggagatgtagggagggaactaaggcagaaaagggcgtagcgcaggtcgggggaagaagaagcgatgggactcgggaagaccaggcaggcactcggtccttggtgcgccaataggagaaaaggggtggggctggcggtggggactggagaagctgtggatagaccggactggtttgagtttagcgtcaaagtctgctgcaaaggtttaaagccgaggcggttgaagccggtgatagcttcttttcctgaaaaggaggttcagtgttgcactttgattacagtatggtacggagtatactgagtgtctaaatatatggaatgggaatatatatgtagcggaatatacaacatatccaaaatgcataaacaggataactatctcctacgtactattgacgttcacttcaaacctatcaagtcatggcaacatctcgtcgcgtaaccgtcacgatacctacagacgcgggagtggagacagtgaaataacaacaacaacccccggtgatcggagccctatctccatctcctgacatctggacgtgtctggaaaaaaaaattaagatcaaataatactccgtagaatgattcgattttagaacaaagtcccgttcctacagtctcgatctcaatccataccatgagtgatttatgatgtttctaccagataaccgttgctaccatagataattatagtacaaagcacataccacaccaatctcaccaaggaagaaaagaggagaaagggggcccatcaatttcctagcgggatttccgtggaacgagcccattatcaccgccaattggtcacgaaactcaccaaattgcgagcggagtcctcggcggctctccggtacgatcagtgtatatagtggaggatagtatacggcagttcttatgtatttgaattccctgaattccctgaattagctattttggctatattgtatgttgtgctccctatttacggagtactccgtactccgttattaataatatttactttcagcctcccaatcagagaaagtgggggaaaatcactcagttaccggtaaaaccccaccctggataaaagcgagtctgataggaagaatacgggaaaaaaacatgcacaagatgcaaggctctcagctcggaaaaccaacacacactctctcagtgatgattggcgcattgggggggcgcatctcaccccgcaggcgcggaacctgttcctacactgccggtgaggaaaagggaagtggatgggggttgaagatatttaatagtttggtatttttggatttaggcatttagtcatttctagttagttgattcttcagctacctaactgttacaaaagtaccttgttatcaggaaataatagtctaatagtcgataatgcacaactcaacaccgacaatctccaaacacaccagtggccagtgggaccagcggactccgcgcggacaacacacagtgtctagtgcgggatatccggtgtcgagcgcagaacgggatgatcaatatcaaattcatacggcgcgtcaatcattggacgccgcagccgctcggtatcacagcgccgtatgcatacggaggtcaaccaatcaataataccttggcctgtacggagtcacttcggacgatcatcccaggccccaatttcccaaagctgctggcgatttgtctatttcttatcctattttttatttttctcatttctctccttatatatacatcctccgtactgtaatataaagcgcctttcgcggctgtgctcaaaagggaagagtaccggccaaattaaatgtctcaaccccaaaagttggacctgcagacgctcatccgtgtcacttgatgcacgtgggcccatttctgcatgttgctgggatattgcatattgcatatcgacttgccctgtataaaactttgtacgaatatcatcatatccacttcgcatatttgcactaaatgaggttaaacacgctggctaatggacgggtcagaaaggagggcggaaaaagtacccagatggggtctggagcttaccgttcaatatatgggtattcttttcccagcgctaatcgttcaggggcgatcagtagtaaaggcttgactttgtattctgttctatgttgatcgcgatctccagccgggatcacttttgaactagccctaagcccaagcccaaacaataagaaaccgaaggaagaacaaaattgccctaagttgatggcatacagtagtctaaagtcaatccagaaattgaagtctgtgctcggcagatacaaatataaacgtaaatatcacactcgaactaaaattaaattcaaacccgcaatttccctaaactccacccgtcgctggccagtgctgataagttgcgagactacgccggacacagtaagtctcatccgctaatacttcggcagatcgcgtttgagagacctgtgcggatcaccacaccccggatgatgatcattgagcggcgattgtgtcttggtctttctcgcgaatttgatttgatttgatttttcaaggtcgagatcgaaatgcaggatgaaacctcgggcaaagatattggcgttgaccttgatattgaaatcttgaaatggcaggagactggcatgagtccaccaatgaacgggattgattgttgcagggattagatgccgagacagggatttaaggaagttcagcgagaatggtatttactagaaagtgactcattgtcactatgcctatgaagacacgaaatatattgccagaatatatgcctaaattaatctagatatcgttatcatttcaatactgcaaatcaaagttatgtgctcagtaacagccctaagaccaaccatgcgagcagtgtatgtatatgttgtattttccatgcatgttctacgtttgctctaaacaacacgaaaacttaaacacaagtacaatatactcttctccgtactttctttttaatctttcctttttcctgagtggcgcaccgcactatcgcctgatacagcagccgtcgtcttactagcgcaacccagtacataccccctggtaaaaaattccagggttcgctttcgatctggaccggcgacatgagtcgtacccacccttgttctccgacgatgcgcgtcggatgaaacccctttagggcgattgggcgattgctatgccgccttgaagacggaggcgcttatgcacactgcgggaattgagttcctcgttctactccgtaccggtactttctttgacgctagtctgctgcccgcactactgcacgtcgctctcttaggcgtttcttagatcttgtactgtgttttcaggtgtatttttgtgtattcttcttgtcttgagggtcacttcaatgaagtacggagtagatgttggatgcatacatgtacggtatgggcttatcgaaccatatactctctacagagtacagaggacaaagtacacgcattgatatcctatgcagttctgtttttggtggtcaaattccccgagtagtactcctccagactgtagatagcaaatcggtacttgtgtcagctaatcacactatcctgatatcgttgtgcacgtggctcggtatttctatttattacacctagaatatagggacctgtgaaatcgacgccgaaaatgacagcctctggcgccagaaacggccgcctttccacccgtaactttggacggccagccgccgcttgaccgcccgctgccctgtacagccccctattctgcacccaaccaggactgttagtcatcctcctctcgtcctgttgttggcgcttgacttcaacgattgttcccccgtttccactggcgaccaaacgacgccgaaaatggctcccttctgcctccaaaccaaaggccccctcctttttgcccagcctggtcgagcgcttataagatgcttcgtccgccctctcttctggggggtctttcaacgccctcctctcatctcaactccgttgccttgatcgaccttgacatatttgactcccaaaactcctatcgcacaacccgatccctggccgtttatcccacttctcctcatggcgcctgtgtccatgcccccagctcaagttgatgagcaccagtactggaccgaccccatcctttgcgaggaaactcgagccagactgaaacatttccggagccttggatggcttcctccaaacttcaagccaagaacgctgataggaatcgccacggtcgaacggtactggcggaagtgagttgactgatgaaataaaccttgcggctggggaataacactgaaatagattttgcattcaatcgaaccaggactacgtgaactaccttctgctggaagatcaagctatttacatgaactttttcgactggatgttcaaaacatcgcgagagaaagcacttcaatcgtacgacgaatactggcgccgcctttgtcaatacttccaactattcgcccgtcgcagtgttaatgatgatgttcatacgcagatgcgacgcgtacggttgcttcttctgttctgaagaggattgggctaactagagtatagtttcttaatggcgtatttccggctgagcgcaaaatttccagacgaacaaaggacaagaatactctagatgtggatgtcttttgtgtgatctatcggcatcactgggtccattcgcggttttttcgtcacggaagtatgatcgtccaatttgctaccgtccaactctggtccgccattaccgggacccgacctggcgtcttgcttccacagaacacctctctacccggtgactcctccctgagcaagcgcaaacaatatcccacttttcagagtgatcttccgaaacatatccccatgacagaccttccagactcggtctgctatcgcgacattgagctcttttatctacgcgacccccagagcaaacgtgacgttctctgtgcggtcatagagtttcgtaacctgaaaggtcggccggaaggtgctgatgggtaagcgtggttatagtctcaaatgctggagcatcggattaactactgacagtcaccgccagaaccaaatttttcatgcatggcgattaccaactggcatattgtccgatcactcaaatcatttctttcgcttttcgagatggagcatttgttaatgccgaactcacaccggagctcatttggcggctccgagtcccaaaacgcagttcctccttgccgctccgttggaagccagaggttcttaacacgcccctccttcggcgttttaatcgcacgccatgtggctatgagcttcacccgtcgttgccaatgacttatgagtccagtcgacgggcacttcatgagttaggtcgagatgctcgattcgaaaacgatattggacattacaattttcgtcgttgggtcgcaaatgaagtcaatcgtaagtcactccagtgccaaatctccggaaactttaccaccattctacgatgttcgtattaagtctgactaggagcggacaggaaatttcactagccaggagcggcagagagtgctaggccagtcgggtgacgcggtctttgaaagacactaccagtcacagttcattgcacgtgatctccaacatgttgttctccttcggccgcctcaggagggtttattgcgcgtcgctggcagtatgctcaggaagagggacccgttagcgccgtccgagcttaccgacacacataaacgtgctatttgccgacatccggaaatgcttgagttgaaacgagaaaagagagagcttatggcggagatgcgatctctggctggcactgtgaagaatgccgaaaagccctttccacacctttatcaacgtcacaaagctgtcgacagagaaatgaccaagcttcgcaagactttggcaaccgatactcgagagaccgccagaaaggattatttccgtaacgcacctgtactcgaagtcgaccgacagatcaaacagcttcttggcgatcctgatactgaatcatgcgatgcggacagttctgacgatgaggactgggagttgcctaccccgacgtacgttttccttgaacgggctcgcctcgtggagaacttttatggacctgaagcggagaattatgacgaggaccagctgctcgcgcgtcgcatccaggtaaccaaggacatggtcgcgctcctgaggctttgcgagcccagcaggcgaggcaaccgtgttgactggaaattcgacgacgtggatgatgacatatcaggccagccagaggatccctcggctcctgaagaagacaatatgaaatgtccaacggatgtctgcatcatttgctatggtatatcccgtcgctcggcgtcaaaccctcctccacatatatttcctaccaaccgtccagactctcttcgtcgtcatctcatcgactctcatctgcgctatgctcacgacggaatcagctgcacctgggaggcctgtcgcaatcttccgacgtttaccaaaatcaccgaatttttggcccacgctaacaatgagcacatgtacgatatcaagattaaattgtgtcacctccccagaatgccacagttttaccctagcgacggttcctccagagacgcgtctacggagccggagactcggcagggcaccgaaactcccgcctcctctcttgattttgatatggcaaatattgaccctcgattgatggaaccgggtcctatcaccgccacgaagccatcatgctgccctcctagcaatgaagttctcgcctctgctggatgtccaatgacgagcaccggttcaaacttgacggagattcttagcgggcgagtgacgaggggagcagcaaaagcggcgaatcgagaacctgaccctaagctggggtcttcatcacagcatgggacgcgctcatctcgaaaacgcgggcgcccagaagagctgccttggggagaactggggggaaagaggctgtcgggcgaattgaaatcttccatgatcaaacctacactacgtcggtcaaagcgattacgagccctgtgattcgtgtactcggtctatttatgtttgtatattcgagtgcaatccaggacgtctcagtagatcgtacatcgcttcccagttatgcaatgaatttagccttcaactattatctctccattagcaggtcataaaataagtaatgacctatggtggtcaaacgaaaatgttttaaggaatgataggatagcaattgggctaaacataattctcagatcaattcccaaatctagaggtaccagtgtgtttagtcagcttactgaaaagtcagactaggtgaggctcgttacattaggttgttgattggcttccaggaagatgactaaagtgaccctcaatcgcaacagcgaaaacccaaagggtgtcacgagacttccgccccaatgatctcccccacggcaaacaaagtagagataggaaatctttggtcctttcttcgtcctcaacttatatgcaccgaaagcgtgctgattctagattttgaatagggtccctactttccaacgccagttcagaaccgaaaggaacctctggacggcccgaagactttgtaacttggtatcacttcaaacaatttgaattgatgcggggcttcataaactgagatcaagtacagatcttccttaaaagagttcagaccctccatctggctaatgatcggcttccagggggctgataaactttctcttgaaatgcaaagtaataaatgggcctgcaggagaaactgaggaacgggactaatggagaataaacgctcacaaggactcacataagagagtgaacaagtggaaactgacatgatggtcttcttccaagaacgagataaaactggaacaacgtatgaaagtctttaggtgcaatgatacatagtgaatcattagcgtatagatggtgcctattccattggcaacccgtaaaagctcgacgattgcgtccgcttgttctgaatctaacggatattccgagagagtccagtaaagcttgttgaaactcacattacgaagttggtccaatccatgtctagtagcgaagtcatacaaacgagcatgcaccagcagtgtcttaggatgtttgcacaggtggtttccatctccacaatacagcaaaaatatcgaattgtcgctgtgcacctggatatcttcatgactcgcaaaataattttctttcaagggaagtagatcctatattgcaatttcgatttcatcttcgcatgcagcatgactcgaactatcggctgctggaataaggacagagtagtccccactgtgaaggtactgaaggatatggccaaagatatcctcaacatcgtcgtcaaccacataaattatttcgggcgaacttttataacgacaccggaggctttggattatcccgctgggcgcagtgaatttcttcccgttgggaccaacctccaggtatgccaggggggagataaagtgactaagttgtttttagataacgcctccagaggaaaggaaagcgtacttactctggccgtacttgaatcataatgagatattccgtcggtgttatcaactgaactcgaggcagcaccatatacaggagaatcagaagcgcagcgaatttcttcccgttggggccaacctccaggtatgcgaggggggagataaattgactgggtgtttttagataacgcctccagaggaaaggaaagcgtacttactctggccgtacttgaatcataacgagatattccgtcggtgttatcaactaaactcgaggcagcactatatacaggagaatcagaagaagtgagcagcatgagtttaaataattgatcagtggctaacgagaaatgtgtcgtcgtctacgtgctccctcaatgtgactggtccaggacgctgactcagcatgctggagcaaggcccacgaatttgatcatcttctttcgtggtcttcttctggaacgcccagccccgcgacctgcgtcatttgctagcgggaaaaggggtatctagggtagaggttgagattgatcttggtgtgagaggctcgcccctagactgtcttaccttcagtatcaaactggagagttcaagaacccccttgggggcgtgtaccaagaaatcgaggctagatgagctttacgatggattcaactaacaagctggacatggcgcttcttgtgcagtattctgcatcactagatattcttgaataaaaaccgagtattatagcttccacataaagctcaccggcttgctcagtaataaattgtaataggttgcccttagacacgcattagctcgtgctctcttcataggatttggggtataagagccgttgactaattatactttcttttcttcttctatattctaatcccttccctggttgactacgacgacgtttctgagcgtgagtagattcaatttgactaagccagtatggtgtgtatcataatcttaaagttctgtgggctggccttttcaggtggggagccaaaataacgtagaacataatcgccaaaggcaacagatggagcgatgttgatatctttacagctgtgtattaggaacaagttcttctgcctaaatccaattattcacttccctgggcggctgggcctaacgtagtacctaggaagagagaacacgctccaattacagaagaagtttccataccacttcattttggtagacgtatgctaattagcaacattagtttctcgctcacagtccaccaacaagagaggtggccatctctaaaacaaattcaatgcgaaaagtctcagcgctatatctcaacaacgatagttgttgttaagggctttatacttctagatttttaccagcgtagttttcgatacgtcaacattatatactactaaaaatgcttatcgtgcttggccacgacgacatttgtaagcatgattagattcaacttggctaagtctgtatgctgtgtatcataatcttaaagaacatctgggcgggctgccattccagcaacagcgattcgagagcggttcacgtgggatcatgtggtgaccaacgagagcttgccctttacaacatgtgcccaatctcaacccactctgtattggatcacctaggtatgatagagaccccatcgcacgctgagaaagtcaggactagcctcacgttgacagctcatataccccgcagcgccgaccagaccattccactcaaaccgggcaatcgaagaattaatgaggtcaatgatatcttggttgccgatgtgaaccgaggcaccactgctctcggaggtgacaccaaacgcacaggtgccgtattgaaccagctgatgttggacgccgaaacctatcaccgtctaggtaccaccaccagcgatgtttgcagcgatttttttgtagtctaacacacggggagagccgcccgaggaccggttgataaaggtagagggcccgcagtcgttcacagagttcctcgcgacaagtgtcatagtaggtacaacgggctggggggcggcggaggcggcggcggcgatagccgcaaccatagcgcttacttagaacttcattttagaaaggacggaaggattggatggcaattgagatattactatacgtgctgcacggaaaagtaagaagagagaatgtgcttaatattgttggttgtcttagtacctaggaacctatgataacttatatatgtctatatcttatagagctcctttagtagctctgattatttactagctagacctaataggtacgtaggaaatgagcgagctagtatttatcgtcctatctggcttactatagaaatagaaataggtaatatttcgtaaattagatagtgtcggcgctggcgtgataaatatcgctaagaggcgcgaaggagtctcgtacgacgtagtctttattctccaccctattttaataataaccgaggtagtagctaattaaatgagctatagggttacaacgctctttctatatatcccggctagtatagtttttaaattaagaaaaatttacggaggataacccctaggagttacggtctagaggcggacttagcgtctaccttcccctatatccgatataataaaccaggagagatcctagtctatatattattcgcgaagggaagctgattatagaagtcaggcagagaaaacggatttgctaaacgatcttaaggactaataatcttagggatgatttcttataagtttctttgattcctacgtcacgattgcccaaccctagcctgagacatctgaatggacaatataccgcaaaacgttctagccaggccgtaattcatagtgtgactgttagccgcaggaacctagtccgaagaatgtaatgcctggaggaagctagaactaggacggctagaccgtaagcgcgataccttcggagtccgaagttctcccgttattgattaaattatgtgtccttagcaactcgtgttgtgcctcttccgccgagaaggatatggggggggggcacgaatatcggggggcttagtgtacaaaccaggctagaagaccatagcagtagatcctataattgagtaagatcgatcattaataatatccattctagataggacgtaggtgacaattagttatacaatcaatggtcgcttagtctcaggcaaggtatcggaaccagagtctccgcctatatcaaaattttattaagtggagtgactagaggtgaggccgacgaaaagaacctgtcaaacgatgcccagaatacccctacaccctggtaccgctaagtgccgctagagttgtcaaagcgctatctctaaccaaagagaattatttttgactacttcctgctgccgcaaaattggagcgagcaagcgatgtaacagcctggctagaacgttttgcggtatattgtccatttagatatctcaggctagggttgggcaatcgtgacgtaggaatcaaagaaacttataagaaatcatccctaagattattagtccttaagatcgtttagcaaatccgttttctctgcctgacttctataatcagcttcccttcgcgaataatatatagactaggatctctcctggtttattatatcggatataggggaaggtagacgctaagtccgcctctagaccgtaactcctaggggttatcctccgtaaatttttcttaatttaaaaactatactagccgggatatatagaaagagcgttgtaaccctatagctcatttgattagctactacctcggttattattaaaatagggtggagaacaaagactacatcgtacgagactccttcgcgcctcttggcgatatttatcacaccagcgccgacactatctaatttacgaaatattacctatttctatttctatagcaagctagataggacgataaatactagctcgcttatttcctacgtacctattaggtctagctagtaaataatcagagctactaaaggagctctataagatatagatatatataagttatcataggttcctaggtactgagacaaccaacaacatcaagcacattctctcttcttacttttccgtgcagcacgtatagcaatatctcaattgccatccaatccttccgtcctttctaaaatgaagttctaagcaagcgctatagttgcggctatcgccgccgccgcctccgccgccccccagcccgttacacctactatgacacttatcgcgaggaactctatgaacaactgcgggccctctacctttatcaaccagtcctcaggcggctctccccgtatatcagactgcaaaagaatcgctgcaaacatcgctggtagtagtacctagaaggtatcaggtttcggcgtccaacatcagctggttcaatacggcacctgtgcgtttggtgtcacctccggcagcagtggtgctcgaatcggcaaccaagacatcattgacctcattaattcctcgattgcccggtttgagtggaatggtctagtcggcgctaagggctctataagctgccaacaggaggctactgctaatcttatcgacatgcaatggggtctctatcataactaggtgatccaatacagagtgggttgagattgggcacatgttgtaaagggcaagctgtcgttggtcacacatgatcccacgtgaaccgctctcgaatcgctgttgctggaatggcagcccgcccagatgttctttaagattatgatacacagcatacagacttagccaagttgaatctaatcatgcttacaaatgtcgtcgtggccaagcacgataagcatttttagtagtatataatgttgacgtatcgaaaactacgctggtaaaaatctagaagtataaagcccttaacaacaactatcgttgttgagatatagcgctgagacttttcgcattgaatttgttttagagatggccacctctcttgttggtggactgtgagcgagaaactaatgttgctaattagcatacgtctaccaaaatgaagtggtatggaaacttcttctgtaattggagcgtgttctctcttcctaggtactacgttaggcccagccgcccagggaagtgaataattggatttaggcagaagaacttgttcctaatacacagctgtaaagatatcaacatcgctccatctgttgcctttggcgattatgttctacgttattttggctccccacctgaaaagtggcaataggcaaaatctcagttcagtctgagacaagcatcttgtgatacactaatctggcggccaaaattccctggttccataaacagctagctggggctttcttcggaaattattctccacccgcaggcaatttgtgtggtagatagtattcaatttactgcaggaaagccgagagtatacaagagagccaatatctttcgcgggcgagaccgaaacacatgcccccggctctttgtattgtgtctcacgttctcagtttcatctagtctgctgcttcgagatctaccctccaaataacaaacatttcggagcaatggtggtgactatgtacgctgttcgataaaatatccactgtaatcactaaaagcataggccatgacgggattgccatagccgacgccagctcaagaccgaggcctggtaatgctggggttagcctcggagagccgccatattgcgtctagcgcgagtaacgctggccccacacccgcataataggttgggggccgaaatatggactccaatggagtcataagttggagcaggttttcagcatgcttcccaaaatggccttatccttctaactccaatctctaagaaataaaaatgcttatactgatctcttaaaagtccgtattcgttgttgtacacgttgctggcagatagggcttcccttaacgaggactgcactgcatcgaacaaggtagcccgatccacttgccaaaggtgcgccttgtcttagatcgtataataaaaatccgaaacgaatattaatcaaagagaagagcacactagcataggctaccgcacgctatctttcttccatcaatactaccctaaaataaaattgatcctacccagcctcgaggacaccagtatcaataaactacttaacactaagcgacgcttaactacacaaatctaatatatcttttaaataatatatacatagttgatcatccagcttactatattattataacttccagctattccgtataatatagggtcggtaggcactaacatagccaccgacttctcggagaaacggacatagcacgaattatctcggatacaaaattgagcctatagggagaggacttcagagccacagagcgcctacagtctaaccatcctcgataggacctctcccacttgatgtcttactttttagaactaaacactagcggctacgggccatatccgccgggagtttaaaaattgggcctccttaccgcaaagggggatccgattgacctatggtttgcgttattaaccactaccccactaggctggaaatggattcggactttggtctagtggtcaaatgctggcttcaataactaatatgtgaggcaatgagctcctctattctagaaaatgtctttcgagaatttaaacggtctaggattcttaccaaagaaaactctgagttctcggccaaactgcgaagacccaaattgtcgatccttacctttacagatctagtttattttacactaatcattgaactgttgagcaatatataagtggttggcatacatacatttcactttcccgctgcttccctttcgggtaaaatgtccacagcatacccccaatccagactatcccacatatcttctcctactccccgtaagcctctcaaagcccctgttcgccagattgcttttcgcaaagaatacgtcaaagacaccaaaactcaacttgtcctcaaatcgcaaggtgatgctcaatcggcggttgcatacaaggttcttgacgaatatggctcgcttcagttcactgtgactgggcggaaacatagtgatcgcatttgtcgcgaaattcgggactcgtctgggttacctttgttcgaacttcaccgaagaacttcgctcacagctacctgggctgttacgttacccggtagcaacaatgcaagtttagctattggttccccgcgatggccatttgggtgtctctcagctggaaacttcactctgtctgctgagaatcaagctgcggttgacacaaaggatggcgatgagaaaaaggtcacgttgcttattgagaggcatggcaatgccttggcactatttgatatagtggatggcgataggaaagtggctgaagtgcgcgagagtatacaacacaacgagaagttacctttgacgcggagttcctggcaaaaatatcggcctgctcttgatcttattatcacttccagagttgatcaatcactggtgagtgcctcgaaattattggtggttggacgtcagattgactttgtaatagattgttaccgtgggagtcattttatcagactgggtctttggttcgacttgagtacagttctgtcaacggccggtgaatccgcaaggcctcatacatagcaatagattatcactagacaactatatctgtccgacagttctgcgtacattagaacaaaaagggctctagtagtaatttacggctgacgacttccaaagcgatgtaatcatatagcaatatgggcccttctccagggatacaaattaccagggttgtgtgagataataccctgcccagcttatcactctcggttgatccaccgaccaagaggatttcaaaatgaaacggtgactatgcataactacagtatggattaaggatggatagataaatgactccatttaccctcaaaacgttgatttgaccactagaccaaagtccgaatccatttccagtctagtggggtagtggttaataacgtaaaccataggtcaatcggatccccttttacggcgaggaggcccaatttttaaactcccggcggacatagcctacagccgcaggtgttcagttctaaaaagtaagagatcaagtgggaaaggtcctatcgaggatggttagactataggcgctctgtggctctgaagtcctctccctataggctcaattttatatccgagataattcgtgctgtgtccgtttctccgagaagtcggtggctgtgttagtgcctaccgaccctatattatacggaacagctagaagtcccaataatgtagtaagctagataatcaactatatatatatcattcaaaagacatatcagatttgtgtagttgagcgtcgctcagtattgagcagtttattgacactggtgtcctcgaggctgggcagggtcaattttgttttagtgtagtattgatagaagaaagatagcgtgcggtagcctatgctagtgtgctcttctctttgattaatattcgtttcggatttttattatacgatctaagacaaggcgcacctttggcaagtggatcgggctaccttgttcgatgcagtgcagtcctcgttaagggaagccctatctgccagcaacgtgtacaacaacgaatacggacttttaagagatcagtataagcatttttatttcttagagattggagttagaaggataaggccgttttgggaagcatgctgaaaatctgctccgatggagatttgaggcgcacggaaaccaagctctgactctaattgtggctcgtattttggcccccaacctactattcgggtgtggatctagcgcagctcgcactagactccacaatacgcccagcatcaccaggcctcggtcttgagttggcctgtcaatcctgggatggcctgtgctttcagtggttagaattggggtttgcaattgagcaaggtgcatagccaccgtcgctccgaaagttcgctatcttgagggtagatcccaaggaaagaaattgagagcttgaggcataatggaaaaagccaggaacgattgtttcggtctcgcctgaaaaagatctcggtcctcttgtatacctctccgctatcttgcagtcgattgaatactagttaccacataacttgcccgaaggtggagagcaatttccacattatccctatcgaggaaaccgccaactagctgttcgtggaatcacggaaatctggccgctggattagtgtatcacaagatacttgtctcagtctgaactgattttttgcctattgccacttttcgagtgaagagccaaaataacgtagaacataatcgcaaatgcaacagatgaagcgaagttgatatcttacagctgcgtatttcgtataacttcatatctaaatccaatccttcacattcctggccctaacgtaggagtacttattatttcgctggctaaatcctcggaggcttatgctccaattccgggagaggagacttcgatatcaatttattttagtggatatatgctactttcttagcggcattagtttgtcgcttacgctctaccaagaggagaagtcgtggatataaaaggcgttcaagatcctcccaaagctgatgaaaacgtccttcaaaattagagaccctttcctttgagacaagcatatcacttctccctcggcgaatccttcgtccttgttttagtgtacttttcttcatcatgaagcttccaattcccattgctttcgctaccctcttggcctttgcccaagctgctccatcgggccccggagaatctcgcttggaagcacgagcttctgtcaacgactgcggagactcgaccttcataaatcaaagcagtggtggttctccacttgtggctgactgccagcatcttgctaggaatattgctggcggcggcacctggagagtcactgccaccggcggccagcaccagctagctcagtatggcacctgcgcttttggtatccaaggccacaaagacatggatactgcacacgttggcaatcaggacattatcgacctcatcaactcttccatcgccaagttcaactggaacggaaaagtcggtgcgaagggcgatatgttatgtcagggcgagaaggggctcatgggtaagcccaagatgacgtggggtatctatcatacttgagctatagcagtgcgatcgatggcaggtttatttgtaagttgctctgggatctcatgtgtcctatatacggagaattgggcgctaatcacatcttgaaggcatttcatgatcgagacaagcatattattgtgtcacatgcattttcaggccatgccatgctcagttcagtgtacttaaatagtggaaatatcggagggactgtctgattcaatctatcttacgtatattcgaaactgcgccttaccgtagaaatgtggttattacagatcttagacacttgttgcatgttgactgaaatgcggcatagttttatcacgtgtatccaatcttgtcttatttggctgttcatgatattgagtgtggcacaaaaaacataccgctccggaaagctcgtttcggtaatacacccctaacataatcgcgccggctataacgccctttttaccacagtcgcaagaagttgctcgctaaagtcgcccagctcgaaaggttgagagaacaccacccaatcagcacctacttcgaggtgccattaccagccctcgtcgccctcaaaaaagccatgttcaagcttgaaaacatttggaccctatcccacaaagggtgaggtgaatgaaacgtttgaaatcgcgacagctccccgtatttagataaaagattgttagagtagtctatagatacttttccacttagactaaatatcatatctagctattttagggggtttggagaactttgctaatttgatgactgattagggcgatgtaattcccagtaccacaataacgcaagttttcgatttcttcgaaataggtatagtatactaaaaattcttatcgatacctctctgacaataatggattagatcaagttgtggtggttgacgtacaacgctatattctatcgcatttacgatgtgtttcgcagatgtcggtcgcctggagtgggtggcttggcttggctgtcttgcctgggcgtttcggttagagcggtgggccccacccatggtatgtcattagtgtccgccatggccttttcttttcctttcctccaacgcatcactaccaacacccttgaaaacgaacactggctgaaacatttttgaaagccacgtgattccgtcttgctaatgcacatcattgagagcctcatgctggggtgccggcatttgttgcggaccttccaaaggcgcagccttgttacgactgccctctgccttgcatttacaattttcctgcttgtacctcggtcaagagagcaaaacattgcagtgcgacgcaatccaacagtctatgcttcaaggtatattttctggctacccgagctaacatgtctccttgagagttctgaacgtcgcctgaagcggcggttcacgtccagtcgctaacatgctcatctccttgaagtaaaaagaatgccttttttttaggttcgggcgctgattcggatggggtgggtctcggtcagcttgttttggaaacttcccaggggtcacaatccataccttacaatccatatcctgaatataacagcgctgcatggaaaagaatgtggagaggaacttaccagcagtgtgttggtgcaaatggttcagcactggaccccaggaacgcagaaacagcgatgaaagggtttcgctggaatcaatcaggtgtgtaagtgagactagcctaaggtgaagtgttgtaactgatagcactctagattttccggcgccaatatttggatcttacgaggcgtggaaccttgatcggagtttctgcaccgaccggtactctcgatatgcggcgtacggttacacaggggaagttcaagatggcgattcttttgacacctctagcgaagtgaagtttgagtatgtgaattgggccactttgcaacaagactgcttgcagcgcaatgcagaccgataccacccttcaaatattccaaagacgttgactctacacaaggagtataataaaggaatagatgaatatgtgttgagaggagaggacgcagagacatcccaaagtaacgcctctgctatcttcaaaccacggacagcggtggttctacgcacatggctcgacatggagtatacggaaaacgatctccattatatccagtcgatgatcatggagctgtcgctcttatcgggcgcagaatatgaggtagtcctcctagttgatgcgaaaaatgctagattgcctcgtccaacggacaaggccggcatagacagtctcaaaagctcacttccgcgggagctccaggatctggcagtgttcttcaactcggagatactagaagactggtacccgaaaatcgatgttcacgtgtaagcttgctttctattcattttcgtttccctacacctgttgtcaatttcggaggagacgctaatctttatctagagccatccttcaatacttccagccaatgcagattttctctcggctgaatccacagtacgactttctctggcagtttgagatggattcccgttatacgggacatttctataactttctccagcaggcctcggaattcgcaaagcaacagcctcgcaagaatctatgggagcgtaactcttacttttacatccccgctgtccacgggacctgggacgatttcatcgatcaggtagaccaaagtatgacgggccttgatagtgtttggggaccgcggccagcaaaaggcatcaatgttggaaatgaagccccaaagccaccgcggtcaaacctagaggatgactcttggagctggggcgtgggcgaggaagctgacgtgatcacctggttgcctcaatttgaccctcggcacaccgattggccttttgccgatcgggtgtataatttccgccagaagggacgtactccgcgccgggcatccgttgtcgcaatgtcccgtgtctcggcacggttgctccggcttatgcatgcggacaagactgagaaggggcttggactagcatctgaaatgtcccctacttcctgggctctttattatggactgaaagcagttcaagttcctcagcccatctaccatgcgcacgagacgaatcccgatgaactcaatctccgagctaattcaggcaagccaggtcagatcagcgctgggccgaacagtatctggagctggaaccagcacaatgatatattgatgaaaatgtcctatatgtttggatcagaatttcccgagaagatttatcgagcctggctaggctacgacaatgcagaaaaagtgagtacctgcgctgacgccttgacctgccgcttttccgcgcgcttgggtccccaggttgatattcgctaacaatacgcggaaaggaggggcgtcgtcggctttgcttgcctccgatgttcttacacccggtgaagaacacaaaagaataaaccggctcaatcaagatttgggactcgtcgtcattcacgcgcaccaagcaatgcaaatttttctattacgcactcatggcatataaggataatcacgatattattccggaattccgcatgccactttgtctgttacccaattctacataaaattatcaaggaaagaacgaatactgtctgaaagttgttatgtacaaaatgaccaccgcgggctaagaaccagctcgctctttcgccgcatcatgctccgcgcgtaaagcctctgcatcattcatctcaaacccaaaattccaaagcctctccgcaactgtcaactgagacttagacttgacctttctgggtggtaaaatatcatcatcatcaccacctttggagctcttccgcccaacatgctgcacaatgcttggcgtcactgcccaacgaatctcatttctcgcgtttgcgtattcctccgtgagcatgtcgacgtatccgatgtgcttggacgtgtatagctccacaagctccggaatccgtgagcgaggaaagacaaaggcttgcgaacaacatccaaatttgggcatttgatatacgcccctcgatggagggagcatcgtcacccggcccgcggcaaagaaaagcccaatcagtaagggcgtgaatacaccgcttaaaatgacgactattgtattcggcaagaaggagcgggtgtaggggttgagttttcggaagatcaggagaacgcaagcgacgaaacagacgacaagaatggagtaaagaaggtagttaagccattcttcggcgttccaaccaagaaattcttcggtgtaaaaaagacgcagatatagccctagtaagtaataccatcagcaaagaagaaaaggcaaaacggttaggagttaggggtcagggagggagcgaattcgacggtttaggatttgaatttaagaacctccaagtccgtaatggttaaaactcacaatttgccgctcccgtttctcgagtctgttcttcggcagaggataaggctgctacagtgcggtgataccatccatctagagcgacgagatcatcttcaagcataatgacatacggcgtgtcaactgtcgcacatgccttcaacaagtatgtatagtcaaagagagccttctcgcgccctgctattttagcctcattggtttctagggagcgtatatgattgatatcaatttcggaggcattatatagcaacacctgatcagctagtttgtgtaaccacggctctgcaaacgcgggatgctgcgacggatctgtgtgcgcaataaataggatcaagtgtatgtctgctctttcttcctcgctcagaccttcaaggagtgtgcccacggtgtctttgaaatagcgggcgccctttctcgcaatggtggcaattcccaggcagaaatgaggctgccgtggagctctcgttatctgaggcgctgcagcattgcttgctgcatcgatgaaagaagctgcttgctccagcctgatagccgaatatacgggatcataagcattcattgcatcaaaaaatattgaggttgggtcgcggaaagactgtctgcgcgcgaccacaaagagcaaggcgtaagagagcagaaagaatagaaaggtccgaagccccttgaccgagctgattgctgagaggccaagagtggggactagccggttcacaagcatttttgaaaggcgaggataaaagtaaccaggattcacgttccagcgatgatggtagattaggttgtccgtaagaaggtttttagtgcgaaatattttcataagaaatcattctcgaggctagtaaacccaggcttcgcttagaaaattaaaaattcattgcctgtctcctacaatcagctttgattcgctaattccccatcgggtgaaatccacttattcatagacgagggaccggaagtcagcggacgctatttctgccactagagcttagtccgttggggtgttttctggtttctggtcacaaaccccgggcatattagataacgtattcaactacccagccacccccaacccaaacgattaaattcaaacaggtttatctctaccaaaacgccattaaatcaataaactagtcatcatctatccagacatgcatctctcctatggccctgatttttgcataacccgcatgttggtaatgctctcgttggcggcatgtaatcccttgttttctgtagtgggtaagtactggaagaccaggacagtgattttgaatgagcttgttctaaaccgcgaacttgaaaatatccttgaacaacttgtggttctccggaaggctgattggacacgggtatttggcggtttgaaactgcgacccctcgagccctgggagtctttccaccacagcatatgtttattgcttgcttctccgcccgcttcctccgcttccttgatcgttccagggcatctggtgacgtgcgctgccgcacgctgtattccctgaaacgaaggaacggagtgaaagacaaaccgtgcgtctgcacgaggctgacttgaaagctgagttgacgctacgaaaaacacagccaaatttcgcgccaagcttcatcactctcattagtccccacacgtgctcgcgtctctcttgtctcggggcaattgcgtgcgacagcgcgtccccagtttgcagcaggcttggcggtagggggagggcctagtattaggaaatgcgcgtgatttggggtggagagtgtcgtttgcccaataatattcaatgaacacccaacttctttcactatgtttaaaaagaaaatgaacggattaatatagtcggatttctgcaataaccaattgtttaatcaccgcttgcaaatcctctctgggctcatcctttcaccactattagtcttgtaccactttatgcctattcttgtttattctactgataggtgtctttgcaccatgttgttgcccatttaagcgcctcttctttctgttgcccgcattatttctcgcgttttaaatttgtattcctaatattgactacatatacccatttatattccactttttatctggcgagaatttctaggcttgtatcgaattcattgaagtatatttaagcgacagtaacttcacttctctcctaggggttcatgtttaaccagaagcagatttctgtgatctgccaataggagtattagacacttttttgtccttttgcatttgaaagatagaataacgaggttagcttacccttgatagttgtgcatcacgcatgatggccattagatgttattgctaggcggaatgagagccgaaggcttgcgccgtatagtccaaagttatacacgcgtccttcttgaaattgtcacttccaccgtccgcccagaaagatctatgtccctctagggggcggttagaacaatagttccattcccaaaaagtatccctctggcgatgagccccataggccagcacccgaaaagatcgtgtgtcggggatatttgtgtctctgcaagtgttgtcccatacgttgacttcctttgcgtcgcccgagcaattctcaccggtgaatgcgcggaccttgaatgaaagagctccggagctgagacagaggaacgggattgtctttccgatatgcatgattgtagacggaccaaatgtacgatgttgagctcggttttccaggttagaaacgataaacgatgcagagtagtccgttactctctgtaagatggattgtatggataggagacacaagtcgagtaaaccagccgcatttatagaaatctactgtcatgtgccaaggtcctgacctggacgcctaactgctgccaagtgataaaaaatggttagcttcattttccttggacgcctaacactgccaagtgatcaaaaaaagggatgagtggtacaagaccaatagtggtgaaaacattggggggaggttccatagatgtaggaagagtgttttctggcctatgttctccccaggccgacaaagacacaaatccactaccttaaggccagccacgtaatagatctgtggatctgcgtccaggcgggctttgagtctggagatgtggatccgtggttgggaagctgtggtgggaaggctttggcttaaggccctgtgagatagcacagttgattcgaggccacagattaaaggctgtggacgtggatccactttggacgtacgtccacggctcctaatctaggtgggctttataactgtcaactagcggccaccctggcttagtgaccataagggtcctcggtcttctaactacggtctatatgggtcacagatattttgatctagatctcaagtacattatttatcgcctactgccggcgttttgtcggccgatcatgatcactaccggcttcaattactcgtgcgatcgaattcaccgcctcttcactcacaaccagatcgtcgccgaatgtcataaatattgtgttcgtgccatcctcaatagccgcatcaaagcactgccccagtgggacttaccgtagattctggtcataaaacgttgcctaacgttctcgcgcgtttttagacgccattcgcccaacaggagaggggtcagaaggatcgaccaccatttggcggaccaagcgattccaatcgccgtgttcatcacgtgcgcggaacatgattgtcactgcagaatgcttggctacatcgctcgctccttctcctcgctcacgagactcatcttattccgtgggcatcttgtctaacctagctatttctgttcgtatgcgtgtatcggtctgcgcaggagactctggtaacgacgaggggcgctctaccagagtgtccttctgcgtagcatcggctataacctgaacctgcggcgaagcttccagcggtacagactccgacaactgttcttcctattccgaccggatattcctcattccatagtgttctaagttttgatcgatcgagctcgaaatttctggctgcggttcgaactcgaccgagtctgatctttcttccggtacctattgctagtcctgagtcaggccaacttggctaaccacgggccatgaactctgctctccattcatctccaacaaaggatgatactgtgcttcgaggaagtcaatttcagtaacaggtcttgctgtctattcctgatcagccgttcgtaacagtacgtttatatcctgctccagagtttcctgtggtagaatggataacttgcgggtttgttagagccgttgcgtgcggtcgtatggtttgaatttagcgctctctcacagcgccgcacttttagtgcccacagtcctagaggggcccgcttttatctccgatgccccacgtccttctaaaattgccagtactccttcaactccttccgatgaagaaagctgcgctgctgtttctaccgcttcattctcttgttcgcttacatacgcttccatattgacatccttcgaagattctcgcccagctacgttttcttcactccatccccgcggctgctcgtcctcggcatcagcaaaacggagtaacttgttttccttgcccgttagtgccatggaattgatatcttcaaatccaggggcgaggaggtgttattacctctcatgcgattccatatctgggtgtggtggtaaagaggtcacagatgtcaaacgaaactctcctggtaactgtaggggttgcatcaaggaaatttagccgtgcgagaccgttgattcttgtagttcttgtggttctgtggaggtatatcttgacccaacagaaagctgccccgagggagctctcgagggggcaaatccaaatccagcgtgactatgttctgattcttcatagtcactgaaaccatgatccctttcaataagctcgccgtgctccagttcatcggctacggctggttccatatcaggaagaccctgcttgttttcactgattatacccccacttccaacgaagccaagtcctgtttcggatgctggctccactatctctcctatccggctgccttccgaatcaatgcgcgcgatttccatgccatacccaggagataatgttaagttcctggaataaggtatagaatgccggtcggcacctgaggatcggtgccttcgctactgtcgttgctgttgcctctgtagcttcttcgcttgcttctactgacgtctctctcggcgtgcatctttcaagcgttgccgctctaagttactatcctgcccggctcctgtacccgcagacccaaaccgttctctttcaccttgcggcgaacgattgctcggaataaaaagcggtgacattagcaaatctggagttggagatctacccgctgtgtcgttattttcatggggtattgacagcttgctgaagaaggtaaagtagacactcctcctcaccaaagtagaagtagcttttcgttctctttagagggaatcaccatagagttagtcgataaaaaggaattgacaatcttgcaattaggcctcggcttacggatatccacatcgagtctctttcttagattcccttccaccaacgaattgtgccggaagcttatggtcaagaaggacggccctcaagaagcactcgctgactttatcgatcagagactcaatttcttccctattgtaccgataacgatctggtcgacgggctcttaaaagagcatcttacgcaatttgccgatctagcgactactagataagctactcaatttgtggcgaccaaaacccaagtctctttacgagtacagccatctcatacagtatcataggctccaccatctcccgattaggcttcgccgtaggatctttcttctgtggctttttagataactttgggtagtaacacatagaatagagccagagttatcggtatccaagttctgctaggtccacctaggagtgcaaataagaccgaaacccagcttctaatatttatatcaagaactgcgcataggtgggatcaaaagacataaaagccgcgcgcatagcggttctaatcgttaggaaagatctagaaggtgtgataagtcgtttgatacagttcacgcacaattctaggtaccagagatctttaaagaacgtatacagagatggaattataccctctatcctcttcaatcgcttccaaattaacgcccgctcggattctatgaagtttaaaaagacttcgccactgtatacaaggcctttcacggtagttctatctttcgaggagactccaggtgccaggagttgcaatgtttcgaccgtataagggtcaactttgaacatcttagcacaatcgtgtcccacgagtaaagaccagtattacagtagcctagttaacacataaactatctcctacaaacgtaatcagcatctattctttttagagtcagacaaccttacctcatcgcagcaaatagccagagcctacagaagagatccgatttatattccatatatcaccaaggagggcaagacaagtaacaagtcaaaagcagctcggacactcggataagactctagtccacaaagccgcctagctttattatctaacagccgcgccaaccatcgattctcgaagtatgcatttgcttcatttcgatattatcgaacttttaggtaaatctcaccatcgcttagaactctctcgttagaatattcatcgataaggcttatttaaagatcgggactaatgtcttagggctatcaaaactgcaggaaagcatatggtagatttctggcttaccatccaaatacaagtcgacagtccaccattagtcgatcgatagtaaatagtattctccagcctttaatcgatattagccataaaggcactgtatagaaccagtagagaaatagaggcgtaggtaccggctcagttaatcagtcatcatatcagcggcatttactcgtcctgcttaaagagcctcatagagatactaccgtgacacaacagcgctcacgtggttgtaaatatcgagtcttcgacagccttctttatcaaatatctcacagagtctttctacattttttatattcatatattacgagatagatggatatagggtaatctagctaatattaatcttggctgttccttagtaagtccgacacctttctatcagaacctacagttcagggtctatatacatagactcgtccattatattagtgaagcagagtctacatagcaggagagtatcggttttttatatttaactggtcttagcctcacagaagaaagggtccacctagctgattcagcgtcctagtgaccaatataactgcaaaagctaggggtggccccaagacaaatttagttcaatagatacaattgcattataaatagggccctcttcgccttcaggcgctacacttttccgcctcattttccttccgaccattttaatctggcccaaatatatcgaaacaagataagcactgcacggcacttaacttcaagagctaccaagaacggcttgcgaataacccatcacaagaagcacccttaagcaaacagtcacatcagcttgatacacccgcccaattagacagtagttccaactcgaaaaagagaaaaacgtcttcccggagcgaacatacacgaaaggttgtaagtggaggcccaaagcgccttatcttacctcaggtgtacgaggaaggtatatctcgcgggttaatcgtgagggaagaatcaccctaggacacttatcgtcggactctcaggtataatctagcaggcgaggtattcattacagctcgccgttcccgtccatcccaggtagtagccattcgaaagtacaccaaaggggacataactaaaatacgacagctatttggtatccttaaccacaataatatactgacagcccgagagtacttcgtcaataaaggatacatatatactctcgtcaacaacctccagctcactttagagcaacttatagggtatcggtctctttatcccacagaggcggaattagcttccatgatttagcaggtatatagctcttaacacttcaactatcttaagctcatgacagtgcagattttggatggtttatattacctcaatgaaactggattagaacatcagtctctgacataccggaatattcttctcggcctagatggtattatcaagattggtaagtggcagttgcctcctttataatgatttttctaactcctatagccagcttagagatgtgtgtggaatatctaccaggtcaagcacagaacgtatacatcaaaaaactcgcttccattaccatagagatcatacagaagtatatgaaagataatggaatggtgggcatggataacgtggatcgttagcctgtcgactcagacgccttcgggtttctttccgccctctcgacagcaaagtctattgattctttgaaagaggtacccaagtccccatgtcacgagtagatgaatataacactaacacttatcagcaaccgcttgtccgcaaaaagaatcaattggtaggagagttgatcctgcttgctcggtctattttagtctccgcaaggatgttctattcctacgagaggtagttcgaaacactctcagggaattgtgaattttggcgtgctcatggtttccaagggatccatcatatgctcgtacggtaaagacctgttggcagctccaaacttagcactgcataaaataagaacctagcggtgctatatttgttactgtaggtcctaaagcagcggctagatcctagttattcagaatatcagtgcaaaactaatggttaccagagttatgagtaaaggagatcttgggctcagaatctcatctaggaaattgagatgggaatgaggcgccatttctaaaaatgagacgtaactgccacataagggatccatgctgcaatggatttcatatgtgctgcgtgattgactcatgcagctacgtgatagactcatgaccggcccgccgggagaccacagcggaccagaatcctctaatagaccatgatttttaccacgaatttatgaatgaacttagggacagggacagggacagggacagggacagggacagacaaattggtgtcatccgcaaccatcaacccgcgcgcgtatggggaatacaaaggattggttggaggacatggtcgaataactttagtcagcaatcgctactcggaaaaggccccaccctctggggcatggttccctacggtctaagagccagagaaaggcgatggcatcgtgaagataatatatttgactcaacacctgctggaaccgaccatagccttagaatctctggcgaaagattaggtaggaagcggcaagtctagaaagggatttgaggttaggaaccacccatctttctagcttacatgggtttacttcatgctccacgagcgcttctaggaaaatgtttagttggtcccgggaaaagaccttatcacctccaagcatgaggcctactgccataggctcaaacgatcgataaaaactagtcagagctaggtaacaattaagaacataaacggccaacgtgtctaccattttattctaaaaagctgttcttctgcctctatttaaaagtcagcaaacagccattccgtagagtataaataagcatacatttgatttaccaagtcttcactagctagtaagatcaccccaagccccacacaagtagcaactttccaccaacgctcgccccagcggcattaatcgctcaaaaagtcgcgatctactttttacagaacgaattggctcccataaaaagcctataagatagaatctctagctatcgtggggattgcccaaccttttcggttaagcggatgaccgtttttctcactttccttcaaatcattagcatgattttcgaaataaatatagatccaaatctgcgcaaggcggcgattcacatcatctaatttcgaaactgaaccaatgaccgagttcaggtacctcagatataccacacatgccgccagagacgaattcaagtcaaacatatcaacactaggtaaggtatgcaggtgacagtcgactaaaagagactttaacgcagcaatctggccggatcgcataattataatcaaactatcaccacagtcttcgacatctcgggcttgtctttcgctcagtatctcgccagttgcaatctaacatattatcggaatacagtcaacgtactcagctgcctaggtccggttatcgacatacttataattgtgaaaggttcctttttcgatctcttgtacttccagaaacttaaaatctggtaaagtaagaactcttctgtggttataattctcaatgccgaaagcactagaatgattttcactgggctttgaatatttaggctatcctttttcgttactcacaaggggttggatttctgtgttttcacattctgcagaggcacatgcgcctaaagttgacgttcggagacatattatcattatctctttgttattatctatgggctgcgtcaactgtaaagttccatccgatagcagtgagacttctagctgttataaatgaagctgagggacatatttcagtaaatgctgacgctcagtacagtcctccgtattaataaagctgcattgtgaggtagccagatatttttcattctagagtgcctctgaagtgagccagacatcccaatcaacagggtcatcatcagagatatcgggtccaggggcgccgtgagagactaaagtgtctgggtcaaataataccatcattcatatgctagttaacgacagcaagaaatcaatggtcaacttctcgcaacaggcgatatctggatagcagaagaattgactcatgttcagtcaactaaagagtgaagaagaacgttcactgaattcgagagagctggatacataaaggaagaaagcgaatggcaagaaaaaaaaaaaagggcacacagggattttaagcgcctccaaaaggcgcaccttaaaaggtcacaactgcgtcccccnnnnnnnnnnnnnnnnnnnnnnnnnnnnnnnnnnnnnnnnnnnnnnnnnnnnnnnnnnnnnnnnnnnnnnnnnnnnnnnnnnnnnnnnnnnnnnnnnnnnnnnnnnnnnnnnnnnnnnnnnnnnnnnnnnnnnnnnnnnnnnnnnnnnnnnnnnnnnnnnnnnnnnnnnnnnnnnnnnnnnnnnnnnnnnnnnnnnnnnnnnnnnnnnnnnnnnnnnnnnnnnnnnnnnnnnnnnnnnnnnnnnnnnnnnnnnnnnnnnnnnnnnnnnnnnnnnnnnnnnnnnnnnnnnnnnnnnnnnnnnnnnnnnnnnnnnnnnnnnnnnnnnnnnnnnnnnnnnnnnnnnnnnnnnnnnnnnnnnnnnnnnnnnnnnnnnnnnnnnnnnnnnnnnnnnnnnnnnnnnnnnnnnnnnnnnnnnnnnnnnnnnnnnnnnnnnnnnnnnnnnnnnnnnnnnnnnnnnnnnnnnnnnnnnnnnnnnnnnnnnnnnnnnnnnnnnnnnnnnnnnnnnnnnnnnnnnnnnnnnnnnnnnnnnnnnnnnnnnnnnnnnnnnnnnnnnnnnnnnnnnnnnnnnnnnnnnnnnnnnnnnnccccctttaggtgccgcacccaaacggcagttaatcagttgaccacggttttcctcatggccacagttttcccaaccagccaagaagacacaccgttgaagcatattttgccagtcgccatgccctatgaaaatcctcgtcaacgtaatatcatggtcatggtcaaaacggaatacacgctctctaagaaaccgtgacgtgaaccagggttgaaacagacgccggtcaggaaatggtgtacactttgtttagaaatcgggaggtataccataactggagtaaacaggagctgatcacagaaacatagagtatatgctgttccttggaccaggaaacatattgatgaattgaacgggtttactgtgacggtgaagtgcaatagttgaacagtagaaagggctgtgtgttttctagagggcggtgaatcaacctatggtcaatcggttcattcgctggacccacccgctcatctccccatttctcagattagtcccttctcgttacagctgaaactccgtctcatataaccttactctctattcgaggtatttacgaactaattctctcaaacgatctcgtacgtcatacaacgcggatactaggaagttagcgcctggtttgttattcaaagtaatggacttacccataaccagaacctcaccgcggtcttcataagtatttggcagccgttttatatttcgcccggaagcctcttctaatataatttcatcatatcgaggctttccattgaaaactatcgcgcggcgatgctggccgaacggcttgccatattctatcatttagtttgataccacgaaaaaggacatttcgagtatctatatcatattatcagcgcgagtatggttaaacaagaagagccaacccacatagccatcatccaagatatcatcacttaacaagctgttcagaagtagttaggctacaacagcaatatctgagaaattcagcatcgttagtttactctttaaacatagaggccgaacttacccaatgtttacacctcccatacgaaatgtacccggcgcacatgtgacatgcaagtgttatacccatagaggagctttttaagataagagatcacacctactataccaaaatcggtcgcgactgccaagacgcattcgtaatagtctacagatttgctaactccatacagcccgctaacaaatgctgtcaaggaagtatagccatccagggctatacgatagtgaatagtctcagtaagcccttttcgagcttaaacaaaaagctccaggacatcctacttttctagcaaccaagatatcaccataaacgggtatatctgggcccaggaaaataggcttatcgccggtatccagagacttatatattagcctgcctcaacatataggggccttataagtgcaatccttactttcagtggtattacctctttgctctgtattagtatttgttacacccgatcacatctaatagaggcacaagaatagggacatagggggaagacaccgttcctaataataaaaaggaaaagttcgaccagcaatacaagtagcattatgccaagcggaatgtaaacatacagccggggcagcagagtaccggatggcagataccgccatacagaatatatgcaagctatagccagggcttagtgcagtcgaaggaatggctcataaaggaaacggcgaacgaaagggaaggataacaatagaattgcagccataatcacagagccctaagaagaattagcgctactaatctaacagggtaggttaagcgagagcgatgacaaacaattaatacaaagaggttaggcttctcgcgaagtatccagctcttccgatcagttatcattgccatgatgatatgtaaaccaagaagaatgccagtcatccaacccacagcccgatgaatgcgcttacacgtcatcaaagaaatacccatagcgtttgcaaggaatcccagatggtgtgccaagaacaggaaactcatgtttatcactgaaagggttccggcgcggtctctagccattgttattaacggagtcttgaagacaacaaggaacacatttgttacagcgtacgcgagatatgacaaggcatctgctcgagtgcaaggagcaatcagcctatggcgaccccacaagtacggatatgttaagtgtttcgtaatgaggaatgacaaaactctgagtagattcagaaaggaaggggctatacgaatgagaaagagcgttgtcagtaagcaccccactgcaatggcgtaaaagatcgtgatttccattgccagtcaggacttaggtatcacatatttttcaaatattgcaaggaaaccacggtgctttatacgcccaggatagtaaacttcaccagtaggatgactaatctttataccagaaacaacaactcgttcagcgttaccacaggcacccatatcgctgcttggaaccgttgttactctaaggtgtagttatatctctcgtgatatagtttgttgcagggcggctcatctttgtttccctgccccaatttagcggctcttcccggtcaagcatcgagcttcttcctgctttattcatgaaactcgcaatgacattgtggactactgtggtatttggcttggcacaccctctgatatacttcttgacatagcaactacgagagtgaaaggaaaagcaacaaccgtttttcacaaaaggtctataggcaaaaacatactgcaagacgggttgtaatacacttagtatacggcactgcgttataaagtgcctatcgttgctccctggaaactgtctcctccctggttttctccaaatcacgatctgtcatcacagttggagtcgggtaataagagctctggcaagtcagcgctccgcctggtagatgatgccatgtagtttacataccaattgcgaaataagaaaagcccaaaagcccgaagaatccgccgacaaaatatgcacctgaccagtctcccgttgctccctggaaactgtctcctccctggttttctccaaatcacgatctgtcatcacagttggagtcgggtaataagagctctggcaagtcagcgctccgcctggtagatgatgccatgtagtttacataccaattgcgaaataagaaaagcccaaaagcccgaagaatccgccgacaaaatatgcacctgaccggtttcccgcatgcgaatacctacgcatacatctgcatcacacatcttgctatattcagatgcctttttcagcatatttgccttgcgacgatactgtttttggtgcatcaattttctcgtcgatgaattcttggatcgcgtagttttcaaagcagccatttaagctgatgtctttctcttttgaggaagcgacggtctataacaaatgagaggctgaaggtggcgcttgtaaaggctgattgacaagagaaactcaataaaaacaggtgctatgtactttaaaatacaagtacgaaaagttgattttttgaacctttgaacctttgatatgtgaacaaagaagccacgattttctttgcgtgaagggaccgtggtcttgtgttgattaacgttatgaacgaccactgaaacagcaagttaaccgccatcgtaaaactgccgtcaccatataggggttgcagccctctttcacaggcaggtatggcccaaaaaggtgctgcaacgattagactgttcccccgaatagtgaaggccgcgggacatcgaaaagtgcgggtaacatatggcttggattggttattttggggagtggatcgccgtccccaaatagtagaggcagtgaacaccaaatagtgtcggggagtctacgtgtatacagtaacgaaattagccattttttcgtgttgtacaataattagggccaacacggcggaatgctgtggctggcccacctgggtagattgcgttactcaactgtgctctaaaaatgtttatgttcaccatcgatagaccaaacgtgaccaattaacggtgggcatatcacaacaatttttgttgatgtgttactacgaacagtgcggttctcttctgttaagggttcaacactgacggatatttcggttcaaactaattaacagaactctaaacatacagtgtcaaacagacattcatatagttgattattgcgggacgattttgataaaccccacaagtcttttactcatctggtcaatttccattaccatagatattaatttggttgaagagcactgatctaaagacataaaaagctgtcaagtatggattcaacgagatggtcaacacatggagaaagatggcgggcggtgacgttgcaatcaaatattccacaacccaggtttaaacagaggctgtgaaagcggaagctgctgttgaaaaaataggtgcaccttttacttaaggtagtgtaaataatatgattggccagaaagtagcaaatcctccacccggtcatcagatcatgtgcagcccccgataccctggtacaccccaggtctacagcaagaaaaaatttcgaccctggcagtctatattggattagatcggattgggccagttcggaacgggtcggcccggttaagttaaaggtctgggagccatcatgcatgctgttaagatttcgaaatcttgcatttttggaaccttctacggtaggacgctagctgtccccagatcactctccaaaatctacttatgtgtcactgtgcagcgaaaggccggatgtgtgaacattcgtcctcaatatacacaagtatttcccagaacacgtgccgtcgaacatgtgtgtatattaggattttgaaggagagaaccaaccttggacatgcccctggcaaaacatcttcggaactcttcaaatgacacgggcaaagctggtatgacaaatgtgctgtactggtatcaccaatttaggtctagtggcactctgaactacgctaagggagaggctagccggatcgcgcaggtctgactagaggagtcgtcgcccattccccctccactcgtatatacaactggtgttggtaggtagtaatgctactagaaaccaagtaaatttgtattcttttaactacgtctagcgatatctattaggcacaaatcctagggtatcgacaatctggagatacctaaggtacaagatggtacaagatggctcccgtcataatgtaggtgaatacggcatataaacctaatattaaatctagcgaggcgttaacatagtgtataccactcatcaggcaagaattaccttagcacgatctttaagagacgctcttacttgttcgtaaataggggaatgcagaaggaggtagaaatattccgataagtaccctaatataggttagtaggtcttggcgccaggggtggcgaaacaataaaagaggtaatgacaccaactttccggaagtactgtatagggccgaatagttagttctattttgtgactgtcgaccttcgactactacaccgcctatattcccacatattaccaatacaaggtgtttctaaacgagtcatcgaccttatttcgtatatatatctccggtaacagctagaatcttctatacaaacagaagaaatccccacaattatccaaatatcccagtctctttaccgaatggctagttttgttcaccgaacaaatgtatatatagcgaggcccgcacaagctaacgtacgttcgtccttcgccgtacactttcgctatactacgccttaccctctttccagccactagtagccttagatatacaatatgacagtaagaaagtccatagccatctgaactagggctttatcaatgaatacattgcaggttaccctctctcttgacctagcaagcatacgacctattcgccttgcaccccctccggatacaccaccgaggtgtactagatgcgattgcctgggcagcgaaaaaatcacacgtaccacaaatcgccaaggaaacgctggtcggcattattataaataccttccttgcgacaagtttctttgctttattgatgaccgaggcaatgatccaaccaacccatcctgccattgcgaagtatccagcaagacatacttggcaggctctgaaaaacgcgttccacggggcttgttttttgcttgcaggctaggagcgtgcgacttccaccaacccttcagaaatagtcgagggcagcatattactgtctcttcctatgacttagccgaccatttgatcaaccttcgtcttatttagtggtttcggcaataaggtaggaatatgctactgtctttttttcaattgtagcttgtaggctattaatgctaagacgtttttatagcacattcgataaactaccactcgatcttttcaccctagaagaggcgagcttcatctatcgaactcctttagttctgtaagagcaaatccagcattagaatcccggcctatcttaaacggaaaaaggtggtactaatattttaaagtgatatattatatcatgaaattattggatataaatatttttaaagatacgtatatatgctagatcaatatcagaaatggatactatcatcggaactaaaacttccctaaatattatcaatcttctccttagacttctgaagtttgctcttcaagctaccaagtcgggatttcgctgacatatattgatctatttaatacgcagatagaaggatattaaaaaaaggatcagaaacttcgatatttcgtatatcctcgctttgcgcaagctggcgactagtgcaagagatattgttccttttgaggggcagcgcgaacaatttcctcgaatgattggattgcctgaagagcaacaaccgagactctccacataagatacacttgtccttcgctctgtccatcgatgagctcccactgaagacgaacattggagtcacccccaggagctgatacccttatgaagtttagtaccccagtcactatggagtaatccagccagagattttcttcaggaccaggtataccgtagacaacgctacattctaaagagtaccgaatcactccagcaaataccccgagggtatctccttcctaaactgaaatgatgggacaaactttgagaaatacatcatctttgggttgaagggtaacaaaaatagacttgtttcgcgttgtttctgcctttggctgcaggtcaaagaacccaccaagcggtatagctgacggctcgtgtgatccgctcaattggaagatagtctcctctacgctggagaaccataggttgatagcgctgttccacgcaatttcaggaacacttagtctatctgctacaagcggctggctcagccatagtcttcctatgaaatcacccttactctcctcggccacacgctcttccagctgtttaatatggaagccatacttttcttcctagtcccggaccatctctaccaaagaagccccagcttctgatgagtagcttttgcagaagcggtcgaattcctttgtgcgatacaagaggattttgtcaacacccgcgttccgcatctcgaatagtcgtttccagaaaagacggtactggcgttgattagcgaggctaagtccataacccgcttccttcataaagcgctcggtggcgaccttctcggccatcgtgaattcatcaagagggcctttggagattagcaaatcctttaggtcaagaagctcggcgcctttcttaacgatttcccaatacacggtctcgttgaatcgagactggatacttttgcttgctgagaatgcattctcctacttgattagctagactgcatctgggtattgcaacttgacaatatcatccacaaaactctggatctctttaaccttcgttgtcatatttgcctgctttgaccggtgcccgtatcttccaagtggatcgttaagcttaatacagttgacaagtatgttctcgacgatactgtgcggcgctttctcgcctcgataggtgtacatgtcagtcgacatcccagcctgaggtatgctcatcgctgcgttcgcttcagccgtcgatggaggttcggctggtatgtccccttcccgaactgctacggcgtcatccgcctcttgcgccatatctttggtagtagccttgttcgctttggctttgtttctcttcttcttgtgagacggcacatctagccccttgtagtccgctctacttcgtttttcaggtgttgggaggaaccggtaagaaccacgcgttgcctcaggattcggactagctctgggagtaagaagaggtggtagatctgttattcctacccgcagtctcatttcgcggactttgaatgtcagtggaaatagtctcccagacatcaatccaggggctcaccaaagtcagaaatgcctaggatgtgttgcttaataggctcatcgttgcaatcgccgattccgcagattataagcaactcctgaactttgcctgccgttaaagactgaagattttcctccatggcggtgttatgctccagtccttaccaagagaagtcgaggggagaagtcgcgctgccggtattttcggttgcgcgggtaacactaatccgtaataggaaatataaggtctagaccgtggctaccagaatgagatggaaaagaagggaaagcaggaatttgcgggccaattaatacatcaagcctctctcctatattgaatgcttacgaataccacacgagagcttcattatatctctcgtcagccttagtctccaattatcacagtcgggtgcctatatattgctgtatggtgtttgaagtgacgcgggcaaagctagtatgacgtaaatatatcaccgattacggtctagtgggactcttaactacagaaagagaggggctagccggatcgcgcaaattcgaggtggggcgttaaggaaagtcaccaatttccacgtcatatacatgcagtattgctgctttaaatcgagtgcattttgtactcttgcaactgcatctggtgatattcatgaggcacaaatcttatatctacaaccatgcagagtactgctacagtacaatcctggggtagttagcggcaatctggcgatgcttgaggtatacgatacctcctgtgataaataggcatccaagtaatagggcatataaacctagcagaattggtgtataccaccaatcagacaaggattgccttaagaatatgtgacaagttcttcgagaaacgctcttgcttgcttgcttgcttgcttgtgtataggggaattcgatgctagtctgcgcccttcagaatttctatcatagctgagatcagccacctatggcttccccatcatagagttttgcttgaccatagcctcgagtacttccttgccctcggtcgcctcatcctgttccaaagggtctagcccatagcaagccatgaacttgagccagccaccaaattcgttgatgatttttcgttcggcaggagtgacgggtggctctgttcgcagttagactttcattattctagtagataggtttcgagagcatgaggatagccgtacgaaggggatcggggttcggcattttgtagcgtggatgtgaataggcgagggacagtttggaaagtgtcacgacgatgtacccaaattggctttctactccagagccctaaaagatggaggatatggtatgaccggtagactgattgccagttgttttgaatgaatgatgacctcacccaagcataacaccaaccccgctccaaatgatgctgactaagatgcgccaatggtgcagctaaaaatagtctagctgggcccttgcctgtggtctggaagatcgatattcaacctatgatgtgcgctagatgcaaatcttactatcttaattagacttacccgtccactcagcaacagtgaacctgtataaatgtccaaatgccgcgtgagaggtcaaaccgtccccatgaagcgaactcactatcggcttccaagaaaatccctccagcctcttgtacatgactgtattgtataatttcgcgtcgtaagatgccgtatcctaccaaggcatttgatgcggccgtcgaataaacgacctgcgctgaggcattggcagtggggccagaaatcggggttatcaagtgttaatctgtcagggcgatttcgagaatgactgtagaaagagctagaaaacagatattggtggtgtagcagtcgaagagccaacaatcacaaaatggactacagaacttgatatattgccgcatagctggtgaaaagcggatatcctgcgatccaacaataagaactgggatcgaaatcagttgtgcccaagcacatagcccaaaaactttattctcgtctaaacgctccggaacaaccacagaatgggcaataatgcatccccccagacttgcaccaggaccaattattagaacattgagaacagtaatatttgtggtgatctttggtcgaccctctctctccagacagagatgtgacgagatcggcggcaaagccgacagtttcctcgaggacagaacaaaacctttcactcttcatcagttcaacgatatggtcccgtgagatttgcaccagtagctctcggagatttcgatcatctttctgagtacattgatatgcctcagcaatggcaacggggaaatcatccatctgccaacaggttcttgcgatttgtccaaacttctctttggccctttgcttgagctggggtacaaaatatttgtccgcgacctgatataacctgacattgaagatcataggagaaacgcggccaagctcgttaccgctgctatcatagtcaatgccgtacataaagtggatcattgcctcgatagcgcgaggatcatcgtcattcaactggatagtattgtcggccgtctcctatcatctaggttagaattcagaatgaaacctcgcctgtggggtcgtactgcccagttgcccttgtacaatcgcgcaaaatattcagactgcccacagacgattaatctatgcaacttgaattcttgctcttcggttttgataacaaggtccgaaaactgagaagatatgaagaaactgcgacctttagctcgaaataactaaatctctgggttaaattgccaacctctgtatgctagcagttatatcccccacgacttgaccagggtccgttccatggccaacaggaattttctgaatctgtccagtcatctcttcgggcatctcgatctccgcgtgaggaaccgtgtgtatgctttccacacataagctgttttcacggagagccttcttattgtttctcttcatgagataactgtaaagtatgaaccacgcaatgcgcttaggatttgcaggaagggaggagggagggctgaggagcttttcataggaaatcaggtccttattcctaagtgattacacagaccgccttcatgcatatgaatgtaagggtgtgtgatgaacggagccaccgaaaaggaccgaccagtcttggaatctacgtgtaaccactcaatgtcctccttgaatatatgggcataccgccccagtccaacctgttaggtgttcagatcacactcctaagcccgccagcggcccagggccccaggcgcatccccagtaagggctttggattggtgtcaatatcgataagtggtgatttcctccgtcgtctgactctccaggtatacgcctcagttaccatggagatcatgcagtttggggggttagtgaaaggcaatactggcactgaccaaatctgccagcttacaccccccagaatacaatgatataggaaaagtttagacacccttctgctaccgccttcctggagactccttaccgccctgtatccgcggtcttttattagtgggggactggctggcagaattagggggtttcaaacttttgcagtcactgtatcaaggcatccttgctctacattcagccacagcaagtgtctgcagggcgtcttgtcacacatgcactaccgaataggagaccactgcggtagttgtatttcgaaattgacccacttcagcagcaggcaacgtaaacaatgggtgggaaaacggaggtgatattgtatcaattaaaatttaagtttttagatgtctaaatatgaggctgttgaaagcggtgagaaggtcgtttagatgctgtcctctccggagaaatcgggttgatcgaatcaccttctccacctagctgtggtactgtgaacagcattatcaacgtgattgtctgcttgcttccctcgacaattttcccactatgcggataggtcctgggagcgttatcaaacttggtttgatagatgaatgcaacctccggcttcatatcggttatagaatttgtggaatctggtcatggtaaagaaccacgaagacatagtatgagctggagaactgggatgtcaaaatgtggttagcgtatctcttactcttgctgagagtgccactagatcaaaacaggcagcatagttgggttgtccttctctgtcaccgctatttcctgctattattctgccgcaccaaaaattccattcaattattcaattattgtaactaatattcagagtaccatccattagactcagtaatagcctgcatccaacgtggcacgctctctgatagaccttctcggatatctaagtcaagttgctgcccggcccatctctaaaacatgttggggatcgagccagagcaatgacgtcatttaaccgtattggtggtgatcaatgggctcagaggagattcaggactcaaaatagcctatctgccctcaagaatgcaagggcttagcatatcaccgctaacgcaggccaactcgaacactactaattcggaacataaccggttcggcgaagttgagtgttgaagtcggcttgtcaaaagatgaggctatatcatatcaccatatacatattctacacccaagtatatctagctcattaatcaggatgaactcgttttgttacaggtaaaagacgcaaaaagcgaaagataatttgacttaattcaatttagtaaaaccctcataaatttagttgagaccgatatattatctgcggctcgaattaaggggtgcgggcgtgttgtagaaaataggtctgttcaaatttcaaaaatccggatgaaagcaggacttcggtcagatgcatttccgtttcaagtgcaacgaaaatagaccgacctgaccgcaattaattcgtatggttcacgatcaacaggggtggtcaactaatggtcaacgtgaggaaaagcaatggcgggtggtgaaattgtgactgaacgtccaataaaccaggctttttcaagagggcatgcaaaagtggtgtacattactgtacagcgtgaaaagattggctaactgagagctcctttcccacctaaagcgctggtccgtgcatttcctaataccctcgtacccccgggtcgctgacaagaaattatttcaacctgctcgcctccgcttcatttcgagccctcgggtgagaccggagaacttgaactcactcttctctcgtgtggttcgagtatgtatactagctccaatctctctatccttgtttcccaaggccccataccaagcgcgctagattgcattagggtatctttccgctggcctcggatttgtccttctacgaaagtcgccatgaattacagttatgtgatttctgtacataaccagtgtcaccactctccaagtatttctcagatcctaaatacttaagcactctaagccactgaggcccagagggtaaagcacgatgacttgtggttccaaagggtactcaagagttcgctgtaaattccgaagacattcacgtctcctagtaggcctgaggataagggaaagtagatagcctatgtagtcagcttatcgcgtgcgtaattcaaacgtggtggagacaaagtggcttctagaggtatggaaaggccagtacatgaattaatgggaagcttgcgtaaagtgatgagggtgggaaaagtgttggaacgaggcctggaaaatatggcagaaataggcttggcacggggcttgatcaggacatctctaacctgggtgaaatgaattttttactgtagacttggggggtgcctaggtattaggaaaaatgcgctgatttggagtggagacagttgtctagccaatgatattcaataaacaccctacttctttcagttatttaaaatgaaaatgaattatttaattttcttttcaatcctcacatttctgacaaaacgatcgtttaatcaacagctgcaagtttgcttgccgttgggcctcgtttctcaccactatggccttgtactactcgtcgatgtcttactgactatgtgtttattcacgtttattctactgtactgattgtagtggaaagcgtcattaatattgattgtacttccggtcaactcccaaataatcgttggttgcaagttatttattgttcatcaacatcatgtctcttcaaccggtggctttgcaattagcccgcgttttaatttgcactctaaatattgattgcctataccagagctcactttgtatctcgcgagtgggaccctcacttttcaccattgtgactctgcaagcaatttagctatcccccactcaatttggttagcgtctttatctccggtagttcagagtgacgctagccccaaactggtaattttttaagttgtggaccgagaataggcaaggaaagaactaagaacacagagtatatagtatttgcagttgcgaggcttggtcctgcttcattctactatcatcataaaaaaaacatcgttgaaagtacaaatttggctagctgtctttctgtttcctagtgttccatagcctttctgtgttcctaaatctgttgctctttccatctgaatctagaatatcgaacatgggagtttatattgccgaatttgggttagcgtcactatgaaccacaagaatagagacgctaagacaatttagcgtaaaattagaaaagacggcaatagaaaagcgaagggtaaccaggcaaagataacgcctaaagaaacttttcatggatgttattgagcaatggaatatataatgataaaataaaatgcaattgttatttgagggtcgatcaaatctgcgttttcaatggagaataaacgagaagagacacacagtgagtgccaaggctgatacgtgaaacattggtcgatgggcaagaaaaaatctacaaccagtgattgattcaacttggtctgttgaggtgaaggtgaagaaacccattttctttgtttcatagagtcatactttgattacttgtttcagatcacgtttcgcgggtatccggtatctatcaggccccagggcctatagctgaagcggatcgccccgtcctaagttgattatataaagcctacttccaatctaggcttagtggtactctggacactgctaagagtgcttagtaacagcgtgcaaggttgactcgagtgatgttatcaaaaatggataccgcgggttttcaaccaaatgggtcttaactgtagtttttagacattcaaatgccattaggtatccctaatgactcaagtgttacacacttttgctgtgtctatgaatgctttgtatatgggatgaccgagaattcctacgggggtcggtggaatgattaaacaatggcaaataacgtgaaaggcagtggcagaacggcgtgcggaataggctacagtcaaacctggataggcgcggagatgacaagaacctcgtccagatcgccgagtttcagagcctccaaaagccaaccacaccgcttcaaccccccccaccctgggagcaggaagttaatctagctaaattaagcctagcgcaattagagtgggacgttgggaaagaaagcgtgtgggtctggtggagaatctgcttccgaaatccttacggaacattatataaggcagcccccaccacccgtcttcagcccgcaattgagctctaacattctgccccgcgttaccactcccccagtttgcgacaaatcgcagtggtgtaaagtcgaagagaagtttttcattcgtcactctctcaggatgtccacaccaaccagaataattcgtgttgaaaacaaccctcagaaaataagggaaagtggcctactccagcagtatggttatgagattgtgaccaaggaaggggaaacatacctttctcctaatcaaactgatggagggagagacaaccaaactgagctactcactcaaatggttgacttgggatacaatctctcgataagtgggataagtggagagcgtgtcgactgtcgatatgtggtaagagcccttttccaaggttgaattcacaggtttaacaccgatgcattttcagggcaacagaacggttagctaactaatccttctgtgacgacttctattgaattatatgatataataacctgggcgtcaatgttagttgaatctgcatttggttgaagcggacagtcaagagttgattatataaaacatacttccaatctgagtttagtggtctcttctcgggctgtgccatgtgctaacaaacttaatcgccgtgtatgggcaagatagatgagtggcaaatgcaaacacacttcatttttcggaaaaacacctcagccgggatccgggattagctgacataagccgactggacgcaccacctagttaactatccagggcttgccaccgacatcctaaactaatgtgtcgacttggacaaatccacgtgtattatcgtcagtttccagcgtctggggactgagtggaataccgggatactcgaatgcgcatactaacgcattcatgatgaaaggattgattgaatagaaagacatgcgatcgggggcatgttgaataccctaggtcaatgctaatctttgctagcggtaagttaccgctctaatgctctgacaaaaatcaaaatccgaaaatttagtgccaggatttctccgtgtggctatcatttgagggctcctaaggaactcattcattttgccaagttacccttgcattgtcgccacgtcctagcgcactatatctattgaaggtggcaaattctgaccttgggattttctgaacaactcaaaggcaagtaaaaccatgtcccttttggcccgaagcatagtgaatggacgccgtggagtggcttgctcgtatagagcagcgctgcgaacttcatcctcagtgaaccagcaatgatcaaggtgctcatgactgatcttgacggaactttggccgaccggctgttgcatctcgctggaccagattcgttgcgccatcgtctcttcgttgtcgatggtggtgaacccgagcgtgcgcatgaggactatatcgccggtttttctatcttcgtgatagaaagaacacgtgaaagcattgccagcaattctcgaaggccaaatttgcgtctcctccccgctttctcgggctgcggaatggatgatggtcgggtcctcctcgtctggggttcctcctcttgtctcccaggtattaccccatgagctttccttgccgtttcgcaagatcaacagaacccttagcttggatgggctatcggggtggtaggaaaatgtgacagccatagctgtgaagcgttgaatgggatatagttctttcagacgatcgagaggaatattgagaatggccgcattgacccgcttgggaaggcccaaggtggaccggcgttgtttagtgtagtcgacatagctgagtatggggaaaaaaatcctggaccttgcgagggtgccatgacacttatatattgccatcatgtctcttccagcccgcaatttgatcgaaatatggtattacgtgagaatacaagaatctacaactatgttgcctagcctcctgccaacgaggatacgcatgcttcgatttccgcgaccgaattgtttagtacgagacccgagagcctatcatgcagaaatgtatctttacctcattgatatcgcagggtgaagggattacaatggtaggatgtactgcgtcgtgcaattctagtataaggatatagattcgggctgagtgcttctgataccaaaacgactaccacaccaccgaagtaagttacgcgcagccaaataacgcgcagaaaatggaaagctgctttagttcgtgagggatcccccgaaatggggttgactcatccaccagacccgatggagccgcttacgaaccacctattcttctgtgggcaaggggcaagaaggtacgtaacgagagatacaattgtatagactaaattgaagtattggaagaaaatagatgggagacaaaaggacgtccttcaacataaagcattaacgagtcccagtagggttgccctaggttgctgccaatattgtggagaatacggcatttcgcacttggcataccaatggtctcctccatcccgcaaaagtccagtcataagatatttgccttcgacgacctgcccttttataaggttggcaatgccctgggccttgacaggctgccctagttgtaagacaagcctagttaacatcccctcctcggtaatggaaaactcctgattttgaagccagcccttcatgatgacagccattcctaggaaaatagacctcgggtgtttatcgagaatccatagacccgcgtagatctcagcaagcctaagtttgtctccacctcggtcaagcgcataaaggcgttgacaatcgctgtgtgcttccttcgaaataagtttgtaagaataacctcctatgggggcctgtctgttcgtgcgcattatcatcaagtctatcacatgtcagcctctagctctagcttaacaaagtcataacacgcttcttaccactagggactagatagagacccggcttctttgagcatatttcttctatcttcgacttccgggaaattgaaaaaatgggttgcttgaatagctcccaaatatggttgcagctctcggatttcagaaggacctcgtatatccgatcaagtgtaaaatgcgtattagtgctgcttcttccggcgcacaggttccataattcgtcgtcaacaggctcatacagagggcacttctttgcatcgagttttatgataaagtctgtaagttattagccgatatggcatcgcctagcatgtacaccctttctgaccatctggaacgtcatagatgttcggccctattcgtctaaattctcgtaagaatatatcaggatctgggggtccttgagttagctttataatgatgccgtggttggagagcgtaccatgaggagcgaagtccatttttgttggtctgacgcttgcttttcttaagaacattgctgggtgaggtctttgcttttatatgcttaaatggtacttgccctattcacatgctggagctgttcgtcatcctagaacggcctagacgatctgttacattacaaaaaagttttagaagttccactgagccgatgcatttggcttgcgatggaaaagattgagcttgctcaaagctaaaaagcccgtgctaaaacacgaggccactattctcggacggataccccactgatcgcctaccggcaccgatcttgccaaaatagattccctccaatctgagagtatcaattggaatgtcactttttaatggtttgatccttacctagtgtttatcaagctatgtcgaaggatcaataatctacagagtggttttaacgaagtcccacattgcgaacaccagcaataaagccatgggtttccattgcccttcggtccactcaaactcgaagaacaagcatccaattcaaagatctcggtctttgcctaatgtttattaagaatctggaagaagtgaccgcatttgaataaaggatgagccagaccactacagttttgtacgctatctgcttcatgtgcatagtggatgtcattttcacactgattgggctttatttgcacagaccctttcatatacattcaggaccctttgtcaaattaaaccaaccctgcaagcctcagacggcccactgtatattgttccgattcggtcatcctagcgctctttgccgaaaaatttcttaaaactttccgggtccaaatcgccgttgaacagggtactgtttttcttcacagacccaccactgatcatgtggagctgagttccagcgggatgcttgcctctggcgtcgccgttgaatacacgtgaactttcgtctatttccatcccaaaaaagccatgcgcggagtgtcttgaagaagcacctatggggtaggtgggataatattaggtttttgatcaagtgagggcagcaaggagtgggacaaaatcgcaataccttgtcgactgctttcctcctcgcctcgaggaacgagacctggggaatggttctataaccaaagccaagtggttagctagaagatgacctcttaagggtttcttgatcacaactcaccttatcttgcaaagagagggccatatcctccgtatggtgctgaaaagtgacgggagggccacctcgagagtgttcttctttattgtttttatccatatcaagcaacgagaagtgaacggccgaagataaaggagactgagaaaagaatttcaagtggaataattgtagagtggacgatatcatatttatatcctagggtcctcgctaggagatcaatcacaccactctcaagatgaatgagactgaaaggactggccatttttgcagcaagtcatgaaaaaatcaagcccagccactcttaaaatgggcgtaatcacagccagatttttgtttttaggcgatctaggttcctctttctcgtaaataaaccttgccttcgacaaatacaacgtcaggaagctcaatagtttcacaatctgttttgtcgttgggtttcatggagatggctcggggtcggtttgctggcaattgaatgtgagaacgccatatagaaaagctcacacttcgctggaaaactcacaaagtggagtgcgtgtccatgctgttctctctgtttgatttgaaatgcatactggtagaggcattgtggcgttatatgaaaatttggtgttttgaagctcatataccgctggttcggttcccgtatacgggctggaagaattggggacagtttgatccaggcgttctccactttgctctcgttctgatctccagagggatagtatccagttcggaagaagaggccggagcgacccagaagaaagacagtgcatgaggccagttggtcatccagcttagagtagtgtagagtaatatgtggtaaaaatatcaatagagatggaaggcttcaagtctagcaggttaagaaggtgcctatttctactatccaaggtggccatcaactgcgcctggtcattaccaaagatctagccatggtgagtacccgcccctctctctggtgacgatggtatgctcacatcagaagcccgccccgattcctgcccaaatactctatgggccggcaaaaattgctttggaggcaatgctcttcttgagaattgcatctccatcgctcttggaatggaggccctcggaaaacctcagccaagatgctgaaatgctgctagatgcctgcaagactctgagaagcaggggatcccaggaaccctatctcgaaaatgacttacacctccacgtgggaaatatattaccccgatctcagttatggtgctgttctaatgctagcgctgatgacttggcattttgatgcttcatcttctgaagcatcgcagggcttgattgatttcttgagttggccttacgacagtgaagtgaagggaatacttcaggatcgatatcgaagcataatgtgcggaatggactcctcaaacttcgactttttgcttgtccggaactgagccctatctagtgatctgtgcaactggtaaacatggaatgtattatatctgctttgctcagcagtaaccgagctttctgaaacggttacaaatatcttcgagacgttccttgtaccagtcctttaaaacgttgtggatctcaaatccgagaaccttcccaagtttgcacctttttgcatattcctgcaggtatttggaatgaaggtgctggtaacaaagagctttctttgagtcgagatcttccactggttgttgcaaaataatcggatcatcgccgctcagaggaacgaactttgtaatcccatattttcctaagacccgtgaaataccaacctcaagcaccgcaagatccactaggaatgcttcatgctgatcgccaagctcttgaagagcaatggcatcaaaaaccacatcatcgagaccccttcttttgatgtcctccataagtgtgagtccattgggatgaaaccaaattcgtacggtcttgtttggttagagcctgtgttaatgtggaaaaagggtgacttacatgtaaacgaatcggtactgagtttttggcagaaagactagagtctttcgtagattcatgcatgttacttcgattgggatctgggcctccaaataaaagcgtttcgcgcgagttgcccggggaaaagtaaaaggaggatatgcagttcgaaaaaacacaacgaactctatgtaggctcaagcagaccatggtcttgcagtcgtgaaatcctggtcaatgattcggataaacctgagaaacagtagtttatatcatgatgatccagcagacttgtcatttctttggcatatgccactgattacaggtctaggatagtgaaagttagtttcaaccaaatttcaaattaatgagaaacagccttctaaaaatttgagcgatgcccgagatattgtgcgaaataattagtgggctctctttgatccattcttttgggcggtctcgaaagtccgaaggcactagtatcatactccgtccacgtattttaagtccatttttcgcttctctgacgttgctaatgcgcatatgagctcatgcggtgggcatatactgcgccgcaattgattacgcgtgacaggggtataggttcccaacccatacccctatcgcgcccaatcattcttattagtagattttatattgactctccttccccactatctcctcagaggactgaatcatctattctacatcgtactatcatctttgaatggcttcgtttatccataagatagaatccagcaatactatccactacgtcaccagtttagagaggcacatttatcacctccaggggatactgagagaatagacgccttacatcccacagcatatcctcgtgcaatctcaaattccactcgaaaccacaccatcccatcttctccagcctcccagctcccaaaccctttcagtgacccagcgtaaaagggtttcgctatcaggttcatctcgatcggaagatacatagataaagccattagaaagtttcatcaacaagattccttacgcagaaaagtagtctagagccgtatcttcctctttccctcaaatttccgttttagatttattattccaaagcgaaggttacctacaagacagtgatcccccaacatcagctatcccttctcggcattcagacatcatccaaactcttagggcttttgcttcgctcacacaaaaatgcgccaacaatgcgaagtagacgagattaatatcatcctaccagaatttcttattaagtgcgctttaccatattacgtattatctcagtatagatccaagttcggtgaacaagataataagatatatttcaaaaggcagagccaaccatcttcaggaacttcggcatagtgcagcttagggggtcgaggcaattaaccgccttcaaactaagagcggttaggatatcagaagtagtgatatattattttactatcaggcttctttaccaattaagttcatacggaactaacaaatgaatatagttaccccgacctttacttcattaaggtactaggcgaaagcaaccaaatcgatacccatatttaccacccatctgaaagaagaccaatataagaaaagcccagagagtctgcactcaaaccatctctctattccatacatcatcaaatacatatttagcaaaagtgtccagtacatctacaaaccgtttcgcttatcgctttttacttacaattagcctagattctccgacatatataatattctacactacaattttaatattgctctagaatcgtttgcaaaatagtacctagatccatttagttcagatgccatagataaactagaaagacaaaggctcttctttcccatacatcagttttccctagacaggcaagctaactttagggttaaatcccaaactaaaagggactcgcagcccacaagagacttattacacaaagcgcggaaaagacatcgcgttggcagcgggaccaattcaaacctagacggcccatctctcaatccaattctgtcggccaatgtacaactacagacaacctctaaggaagatcccaatcgttccaattcaaatatatcgggtaagccttccgggcaataagatccatcaacatgatactgactcccacagaccaggagagagcttccctgagcaggaatccaagccctaagggtttcccacatcaagtaacatatgaccatcgacttcggcttattagtccagatccgcactatacagtccacaggcgtcagacagcatattcgctcccccaaattcaccaagatgactcacataggtcctcaacaatgataaatgatcactacagaccaggaggtcaagtagacattatcagacaaacaatatctcctgctatcctcccattagaaccatcaccaagctttacagaccatcaatctcccctacactttcgacaagctaccataggatctctcgaacaggatttacccacctccagtagaattcaagggtccacaatcagcgaaatgctcaatatctcgaatacagcagtctataataaagtgattcttccaccgataggaaggactggcgtggctaacagattacatggcaatttagcaacgagcgatagctctcaggagctacattctcaattcactccatcgaaccaaagtttcattagcagatatccgtcacagtattctacggctggccaaggcactcaatatacaggggtcggtaagccgcaagtcgttaacacatcactctactctcataatatattatcttcattgctatttaaggaacaagaaggcccacatatcgataccgagccccagagagttaacacatcccttcagtcgcattacatactacatgatcttctagaccagtttgaacaatcacaataacagcctaattccgacataacctaccaaacgcaattcactgtctagcaacaacaaatggagagaatcagtatatacaagattcgatcacgcagtcataccaagtgatatagactttccaacacttccctaatcgaatcgccgcattcactccctagccatagttatcatatattcattttttctttattacactagaaacataaatacagtccataggcaggtatatgacatcttcgttacatacacgggttattaatcccagtggtagagggcgtccttatccgactcacagagtccccgaaataacaataagatcgccagagcctgctttactcttaaattaagatgatacctcggttctccatacagaatattcaaatccctatagctctagtggtcagcctactacataacgtactatttattacagaagatacctcttcgtaaaccccactatcaactaaaagagtccaaacccaccgtcccaactcacagtcgttacataaggatacacctttcgcaaacacttcaaaagatacagtactaaaccattgtaagaatgcttttcgtcgaccttcatcgatagaagagcatgtcgtttcgtcaggcggcatcgcttatccaaggataaaggtaaatacatctcaaaggggcaagttcagctgatcggaccctatagatacatagttactataatcagtttctcccttgatttatcgcatctttccacttactaaatatagtagaaccatcgcggggaatattttatattatcgtttcctagtcagcgcccaacacataacccctcatcacgtgccattttgtattatcatatgattaatagcgccattatttaaaagctccgtataatctcacctctactaaagtaagaagaatccaaactcctattcctctagccttcacagtgattatagctggtttccacttcactaaacaaaagttaggcaatgatcttatctcatctatttctagtcttctcaactcaataaatatcccaaaccttctctggggcaactatctactcactatttatagagttcccacgattatagatatcagtattatctcgattggccagagcatccactaatattctaacaggaagcagcttttattattccagatgatctcacccaggtcgcattatcttcacttatgagtactaggtttttaccctataaccaaagcttaggctgtccacactcagatactttacgagtcctaccggtattcaagcacctgcatattaataataagcttatggtctcgctttatcggaaatctgatatgctataggagtttgaagatctaaggtacttacctaagaaaaatccagatattataattacatcggacgatcgactcccgtcggcatctctaggtcatggccaaggacgcttctcgtcgcatccttataccgtgaaactcccttatactatgagatattgcgaggccctgattctattactttaccgtaactacaattcttcttacgagacttattagttagctattctaagctatatattagaatatatcgacggtacagacattttagataaaaacaagctacaagaaggttacagaaagttttaccataccctcaaacagggagatcctgagatatattcaatactagataagctccgactcagcttaattgaagagcgtcgcctcccaataataaatgattaacaagaccaggctaatacctcaatctccaatcaaaataaacataatttagccactcaaactctagatttcaaccgtcttctcacaatcaaatccttcagactaagtgaagtaataacctctttagtttaaggtcactgttttcccagttttcaagtcttagaagtcacaattgaaatacatgtggccaaaagcccaaagtttaacaaccccattttcccaacaaggctcacttaatagatcggtcataaaagctaaggagattttactgttcctatatctaggatcgacaaccatagcgtgggttgataggcagaaatgagtaaacacgacaaccttacgatcaggctccaagcgcgaaatatattcaatttcttagttcagccacactagatcggtatagtgcgcatcttgataggcttcgatagtccaatcatcaatataatagaagtcattcagaccgaaattaacgctttctttttatgcttgggccacccgcgagaacaaagtacatccgaggacagtgatcccaggtgaaatgtcgtagcgcatttgatcgagaataacaagtttaccaagcgtctcgctagatcctcgagtgccatcaattctcgttttaaacttattaacagcggattttgtctcagaccagctgctataatacgctttgtgattacctatcactaaaaaaacgatacagaacacttccagctgcctacgcaggaagtagaacaagccttcatctttgacatagccaatatcgccgagtagggctaaatatagtgccttagggttaacttcgaagacgtcatatacaacaggagattccaggtacaggtcagaaataatctagaacatcatatcgtcctttggcgttctatttgtagcaaaatttgtttcatactagaaagtggttatcagggttagggagtggtcggcgctaaatatcgctattagtggtaccgtaggtcacatgactgtttataaccaagaaccgatatacagctggtcgccctataagcgtatatataaactaagtcttaggaaccaaagctagctcgtcaggatcctctagataacttctaaatatttaagtctccatctagttgcttataaagcattcgttcgtctctaccatatctacaccgtcctttactaaactggaggtcgctgctagagcagtaattaatatcctcaaaaccatgcctgaattctcgaactccagaatagctgtcatcgggggattgggtctttggaattatctccgacgttatcgcactactgaggttcgatttcatgattttatctgcttgaatattctctaaataatatttgaaataggatgtcgatttcctcatcactgttcaaggagcgcccaaagcagtcaaggacaggctgcttactataccatcgagtcagttccagcaacaggctcaactctttttttacaaaggagtgggcggcaagtcgattcaaattgacatcactcctgattggcaggtaagctcagtgaccggttttcattgcaaaacatatacttatggtttacagtctccctacgttccatccgccgcggtgccaatatcggcagctcgatcaaacgccttgccttatatttccaagcttgatcttctcgtcttcaagatcaattgttgcggtttacgacccacgccggccaagaagctacgtgatgcaaccgatgcaaggacattggcagaagatctgtgttccagaggatctattaatctcacgtctgctcaaaagattgctgttctccagggcttagatgatgtagcccagctctccagaagagataagtcgtggtgggtggcaaagttggcactgtaatagtggttgtctgagtatggctcgacgatgggtctgaatggaacaaagatcagcagcaatgatatgtaacggttgtaacctgcgaacggagtcttgctagcccaataaagagccgatatgctatggtaacgacaaagtggtccaatcagctggctgcatatttctgaaagcccgttggggatacgcacggacctaggacctaagtggagaaggatatacgtaaatattaaaaccacctgaattttccgcgctggctacacttccccctctcatttcctctccctgactttcgaacttggctaatattcctctcctcctgttaggccagcgggctatgtaggagcggccatatagatggatggactacgtaggtatggccatgcttttctagatcgaagccttcgtgggtcgtgggcgagtgccaggtgggcccatggagcaacgccaagaggtaagcacgcgccctatagggacagccatggaggaaatccttgaggatctgcaaggctagaagcaatgcgcaaaggcgcaaatcttcttcacagtttgagcaaaagcgcatgttaacgtttatgtctttgcggcgcatgtaagagattacttataaaataaaaagccacaggtgcaaatctaatttgggtctttcttgacgaaaatgattgggagttccgaaacattctggggagcagaaaagggggttcttgcttggcggaaggtgctcaccgggtgataattcggccggtccgaaactgagcaattgtactccatacttgtaggagttgcgcctacagacttgcaaacttagtgcagcttcgcttcaacaccacaccccaattgtttgtgagtgccgaggtagttgagggactgctgtcacggcctaccgttgattctcaattaattgatgacagtctcttgatcagatcaaatgaactagtctaggagacataaaggcctacctaattctaagttcaacaaaggttagtggagaaacggaggtggtgatactgtagcaattaaaattcaagtatttaaatgttttaatatgaggccgttggaagtggtgagaaggtcgtttagacgttgtcctctctatagaaaagtcgagttgattgaatgattggttaaatgtggtcaacgtgaggttaaatgtggtcaacgtgaggaaaagcaatggcgggcggtgaaattgtgaccgaactacccgcccaagattggtcaggtattatagcataatcggcttaggaagcctacaacttgcaaattgagagaagttcaactcgcaaggtatattgcataatctgataaatttcataccagaaattgcttccctcctgttttcctaaatccccaagggtgcctgggcattaaacgctgcacgtgatgaatcaattattgctatttcagatagaccgcatgatggcaaacctaatcaagcctagcggcactctgaacgacattgagagagacactaacatcgtggtatcacttatctccatcgcaaaccctcgcgacaacaatagcattgtgggtggtttcctccaaaaatatatacggaggaaacaaatagagccaaaacacagttgtcgttccccgaacgacacagtctgcttattggtgctcctagggtattacctatcattccccggagctatacagtccactcccgcgagctggagatcccctgggaactatgacttgactcctagaaacgattaagagagtgcctaggagtcatgttatggattctgggattgcattcgatcccagaaaagtgagggtcccactcgcgagataaaaagtgggctctggtatgggtaattaataattagaatgtaaattaaaacgcgggctaagtgtaaagataccggttgaagagacattgtgttgatgaacaataaataacatgcaaccaacaattgtttgggagtcgaccggaagtacaatcaatattaatgacgccttccactataatcagtacagtagaataaacgagaataaacacatagtttgtaagacatcgacgagtagtacaaggcccatcgtggtgagaaacgaaggccaacgtttgcagctgttgattaaacgatcggttgttagaaatgtgagggttgaaacgaaattaaataattcattttctttttgagtaactgaaagaagtagggtgtttattaaatatcattggctagacaactgtctccactccaaatcagcgcattttcctaatacctaggcatcccccaagtctacagcaaagaaatcatttcacccaggttagagatgtcctgggcaagcccggtgccaagcctatttctgccatattttccaggcggcatataatagtttttcaaccttcacgagagcttctcattaattcgtgtactgacttttccatacctctagaagccactttgtctccaccacggttgaattacgtacccgataagctgactacacaggctatctactttcccctatcctcaggcctactaggagtcgtgaatgtcttcggaatttacagcgaactcttgagtaccctttggaaccacaaatcatcgtgctttaccctcaggacctcagtgacttcgaatccattgagataatgactgtttcaagtcatggaccgaggatatggcaaaaaataattgtttgcatagttctggtctggtggaagtttcgcttggtcgtacaacttcatgtatgttgttcaggttcaggtgtatctttatcaacctgctccagatcctgatctgttactagctttggggctggatagtagaggttggctttcccaaaaaatgggtcgaggagccggtcaataatattatactaacgcatcaagctgaggcctagttatgctagaattttcatttgtgacagctaaccgatgtgtaaacattgggtgtctccgacgagaaacggtcaactgcactgtggggttaaagcaacggatttttttattttttatttttttattttgtatttattgatttcacaattggcatccctcaaattcagtgggtaaagatctgattactcttctggactcggatttctgagccagctaattgtttaatcaccaactgcaagtctactcttagcctttgaccctcatgttctcaccactcatcggctaatcaatgacgtttcgtatattctactaatatcatggaaaacatcgttgaaagtacaaatttggccaactttctttctgttgcctagtattctatagccatcctgtgttcctaaatctgttgctctttccatctgaatctagaatatcggacatgggagtctgtattaccgaatttgggttagcgtcactctgaaccacaggaatagagacgctaagagaattaagcattagtgagtggtagccaacgatggctcagggaaattttgaggcatatgatgagaagttctttggctcaactttttgaggtcgatggatcttagggaagatgagtagatggttgatctaccatataagacatgtctccgttcagaagattatgcatacgtgctgatattccctcaattctaaaaaaaagtacggtctagagagtgggtacataaggataaggtattccattacatttagctcgcgtcccacttgatacggaataaaggatatttttcgcgggaatcagcaatgaagaatgagggcatgaatattgaagcttgtgtaaataccccaggggttatatccgccgcttcagatgcctcatgtttcaagtgatgataatgaaggtctttttttgatgtgagtggttatctcttcggcatttttgatagatttatgcgggctccttggttctatggtacaacgaagaataagggcgtatatattgaaatataaggcatctaatgcagtgtatctacacaagcttcaagtgatggtaatgaagctcctttttttggatgtgagtggttatctcttcggcatttttgatatatttctgcgggctccctgattctactagtacactttgccatcaacctgctcaaaactgctgatactgtcagagaccaccaggaccaagcaaggcttgtccctataaatacctcgtagacgtcggccctccaagtatttttttatctaatgatcattgcagattgtgtcaacgaacaaagttcagcgactcgtgcagagatcctattccttacaaggccttaactgcccagatgagtcaggtacgtctttttactttcccatgaagtcccctggaatgattgtatgatgtctaaccgcatagcctagagcataccgaagcgtgttttgtcaaacagacggacagcgagaggtaagcttattctctctattttgaaagaatttcgctgactactagctttattgtgcaccttcctcacagcgaaatgacgtaacatagttgtcgttcgaagtaaacggctgccataggagggcagaatgagggcctcgcgaatgatgcaattgagattgtgatctcgctgtggtgactgtgcttgaagaggattttgcaggcgggccgaatttatatatgcactgacgaggcaaatctaggtgccatcgaaacagcgtatatttggaaacggaggctctgaatcaaaggtcgaagcgtgtttaggcctgaggcaccaatcgactctgcagtcaagggtgagtaagctggatccctccgtgacagtccgttcctctcgccaaacagcgggcggcctactctgttaacttcattcgattatctgctgaatacttctttcaacaaaggaccgaggaaacaatcgctgaattacgatgtcagcttgaagaataacaaaggctccgagaagcagcagagcacagccagggggaggaagaacggtgactccaacccacaccgtattggcattctcggtcgccgtcacatctctgtctagagcgagccgagttgagtcggatggaccctcacgactcagggcgaggcggccgacccagtgaaccgaactttgcccccagtgcatagtccctttgaaaccagagaaaatacaaattttggtgagtgctgcggcctcccttttgttcaggaagggatattatgtcatactttgagatgctaaaattaactagttagctaaccaatagaaacattgtgtcattttccgggaaatacttctaccggaaaccgtgatcggctgacgtcagcctcctggatcaagcatccaccagtcgagacctgtcgcgatcttctcaagctattttcccctccgacagatcgatggccgacaacaactccccagattacaaggctctctttctgcaggcggaaaagagacgcaaagaggccgaagagcgacagaagcaggccgaagatgaaggaagacgagagaaaaggaggcgggagcaagctgaagagcgcacccgaccgaccactttcgtggaattcttgcgccattcctacaacctgctctcccggccgttgagagttgagacaccatctcgctcgactaccgggaaaataccccttccgaccgggaaatattgcccaacacaattggaacactggaccgactgctcagcacagcagttagagctctacaagtccgtctacagctacattcagctgacaccagggggtgcgccacatttgttctcatctttgcatgaggtagaaggattaggccgacgactttgtcgtaagcctataagcagcgagcaagaactcgaggcctatgagcgatttaccgtggaagaacatgtccacaatataattaccgagttgtgcaaactacccgctgctcgcgacgagttcggtctcggcgatggaatccagttcagcaatcatatgaattccttaaacgagaacgaagctattgaagcggatatgagccaaccgtcaaatatacaccacccaagacctgatcagttctgcatccatcgtatcgacgacaactctaccactctcctcacatctatcgagtataagccgcctcacaagctctctgtcactacccttcgtataggcctccgaccaatagacttatggaaggatatggtccgatcaaacaaaatcccgacagaccaggaagcgaagctaaggtacaatgcggagcgacttgtctgctccgctcttgtccaggagtatcatgtgatgatccaggaagggctcgagtactcctacgtgaccaacgggattgcccgggtcctccttcgtgttccacacgatgatcatagcacgctttattacttcttatgtgatcctaacagcgaagtgagtgcagaagttgaagatagtttccaacaaccgaagacttctgtggccaggacactatgtctatgtctaatagcattccgctcactcgcacgcggtcaggaatagagaaattctatacgaccagagattcctatttggaagaccagttttaatcacactcgctctcacattcctacagcggagcttcagcaaacccttctccactccaatagcactattctggagtatacaagtccagattccggttcggcttatgaaccgtcgtcatccccaccgaattctccacaatcagcagctcgtcgactgtccactaggtctccggccagctgtgcaccgtcgggtgtacagcatcggtctcagtcgccggactcatcgggctcagattcgaacaaagcaacaagccgcaaacggggcttcagccaagttgcatcatccccatctgtccaacgagcaggtcgtcaacggcacccagggcaagatcgcgatacgaaattctgcacccaacgctgtttactcagattacagtctgggggtattctagacaactgttgtccgaatgtggtgcgccatcgtcgaagcaaagacgttcttcatcatccaattacctcagaagatttggtgcgtttactaaaggcacaactggacgaaaacattgacagatacacaccccttggaggttgcggggcttacggtgcgccgttcaaacttacatgtatcgtatatggctacactgttatcggaaaaggaactacgtcggggctgtggaaagatatctctcgcgaagcgcaagtataccaaattttgcgcaaggcccaagggtctgctatgcctgtatttctagggacgatcgacctggcaaaaatttatttccttcatagggctggagagattcgtcatatgctcgtgataggctagggaggcgaaagtacaacgtcaatagaactcacgcctatccttctccaggagatatataagtcgaacagagagatcaaagctttagaaatcatccacgaagaccttcggcgtgataatattctatggaacgaagagcttaggcgggcgttaatcatcgactttcaccgctctacgttaaagagtcgaccgactttacagcaaccacgagccgtaaaacgacgactatgtcaaccagagataggagatccaaaacgtcttcgtgtgacgtgaggcagtttgcttatttattagattagagcaatacaaatatacatgataatgaagcataaagcatttccggcccgcatccgcataaatcagtcagaatttctatctattataattcttgatgcccacttctccaacgcacctacatggcctctgatgatatatgattctatatgcgttgacaatcacgaattaatcatccaatttctggctctagacttaacttttgtatgataccatgaatcacataaaaaccttaattcaactataaagcttcaggaccgatattatagactgtcgtgtactaaccgaaaatattacaataagcgcccaaccgctcgacaacctcgaggaacgagattatccacataactttcccaggtatgctattagacatacattccatcagcaggcctctctctgccaaactcctttaaaaatttcttatttgattcagcggctaacttcaagtattcgtagttcacctggttgacgtcagctttagcgagagcgtgtgcaattgctgcgacgtttttgatctggttcatgattggtcagcaagtgagatgttcagtgccactcggatacccacctctcgtccatttagagctaaagactccaatcgtcgaagttcgtgctcctcaacaatggcaggtccttgtatcgtacatgccttagacagaaaagttgaccagagatctctacaaaactctctcgttaaattttcatactcaatgatcaaatggatccggctaagaattgcgtcatcaaactagataccccgatttgaagtcaagaaaagaattccttgataatattccagctttcggaggaaaatggtcacaaggcgattgtaggtgtcatggtaagatgtacactgctccataaacgcgtctgcctcatccaagagaagcacggcattaaagtatttggcgatcttaaatactgtttcaagttgtatctcaagcgcattagaatccccgtggttaacaacaagttcgcctacagatatctagaaaaatcagtgactctccaaaatcagccgagctggttggttcatacagaatagagggggagcttgaaatactccgaggttaccttaaccgtgaaagtctttccgactcccggtaggccactagcacaagttaggttaggaagtcttaatcttatagacgctttgccgatatacttcagaagaatgttaaatccctggcccttcctatcaattacatcgtcgaacggtaccgccggtatcatccctaggcaggttttcgccaataacaagaggatggtcttaatctctgaagggatctttaggcagtcgaacaacttaggtgaccaaaccacgtccctaagagcactaactacacactccactggaatcacattagccggaaccaaaccattgtcagtcgtatcacatacagaacattttctccttaaaactgaaacagcaaactgttgggcaggcaaccagtaaatcggcctcgctcagcttctgtgcatccacaccgtctcctcgcattttctccttctctcgctcacagccctccataagcattgcaccaatatcaaggactgcaattctatccttatctttgaccctaatgtcgcggagtgtcggtcaggagtagtttagctgcattttatggaaaaatgcagtatccactgccactcgactgttaatattaactttaatagccttccccttattcataaagaatgcgctgcctttacagtgccgaatgtgtaagccggccaaatcccgaaacttttgacccctctcaatcaagactttccggacttaatcgtgatttagatagtggtagagagggaaggcctcaagagtctcgatcggctttaacccccgaaactttgcaacacacagaaagattccggcctcaccgaacttgactccgtcataatcaaggaatcggcactcgagattcaaccacatctcgtcattttgtgtcatctcttcgcccgtatcgaatacgacacatcggggctcttttgtgccaatgcatatggtataaacatggcaaccaggcttaaaaagcgcctaaagaaggtcatatataatataaccgtgctgtaacattgattcgagacgctgcgagatataagcatatacgtgcttgaggtggtcgataagcaggcggagctctgcctacgccgattcatagtccgaactattgtccatattctccacacatctgtcgagctctaggaggaaatggaaaaggacggtttacttaatctaaaccaacgtcagcgatgttcttaggcattatattctatctcaattaccgatggcttatcgtccatcaggctaacggccttgatatcgtgcagcatatctcgtaggatatcgcgtaagccttccgacttgatatctataaatggcactacctcctcggacgtccggtctgatcatactattagtaggttttcggtatggcatacaaaggtgtcacataccaacacgttcacagacaacgaatgcatacttggcgtagtcatccaggtcattcctagtctccgttggctcggcaatcttatatttacatgcttctttgtcccagctaaacccgtgtcagctatctgaaaaagtggaagggacggttggctggtagctcatacgtttccataactgttttgaattgggattttgatacccatttctcaaacgacttgaaatcatccggtatagtacagatcggactctcgagattaatctcgcctaccgcctgaacattctcttcctgttcgttgctggcagaagaagaccgagcgggcttagttgccaaggagagttcagctgacgtacattcatcgtcggtgagcttgaccatcaaccgcttcagtcgaactatatcgagacctagtggggattggtcctgggagacaggagtgtttggaggttcttggtcggcaagatcgagcagcgcgttctcaagaaacgcactaaagagatgcatcagatccttcaaggtggcaggaggcatagtcgacaccttcgttgggctatcgggtggcgtcaagccttggtggcaggaggaggaagtgttcagtgccatgttgtgcaatttgaacgactagaagtatcggtgcggtatggggagctggtatgaagtggcccaagagactaactgtaatgccaatgatgaagaaaggtcaacaagaacctgagaaattgctccttcttatatgttcgatactccggacttctgtgtgtttttcttgggatacagaatctctatacttgcagctcaaggattgcttcccctcacgtattcggcgtttagctgcatagggctgtgcttcatggtgcatagcatatgaagtaaataccattctcaattggataggttcggaaatcattcagttggtggcgtcgcttttactacttctgtcctggatagacaaaatcgtaccctcgttcttaggaactaatagttttagaaccccataaaagtgagagggatccaagttagtagtctaccacttgagagaaaacttatgtaatggcttgtaactcggtatatctgccacccgagttaatccgactgacgtgggtccttgaggatcctctaacttcacgtgcaaggacctcaaaccaacacctgctcccaacaccatcagaactgctattcctacgtttggactatcgccatcttaacttgggagtctctgggatactacaacaacaactattgacgcacaaatacgcgatgcgttgcgctggccaccgttgacttgctgcccaatctgggtgtcataccccgcttctcttcaaataacggtacgaaaagtcgcaccaggaaagaggacgtcgaaaaaaaaatcccgttccccaaattgaacaacggtgctcagtttgctcgatattcacatttgcactatggcagttaagctcaccatcaaatccttattctacgttcttgactgacacgctttctcagaagggtgacgaagccctcgctgggcgcgaggaacggaatattgctagccatcgatttcctccggacccagaaaatgacagaacaatcaaatttcaaggactatacatatcggtattcaacgaagacacgcaggatcgaaaaacactcgaggagaacgtcgccgagtacaaaggtttcgcggttccgaagggctacacaacgtatgtaaggggagttgaaattgtctgctgggtagtttaggaggaaagtgcatgcttcacgccatatatgtcattcagcctatacccatcattgtgaccaacccagatagtgaacgatacgtcctgtgtttcgtcctttgggaaaagtgtagccacacaagctattgtcccgtacccgtgagacctttcccacttccacaacgcactgttttggactgcagcccgaaatggttgcggtagttgcatcaccatcgtacttggggcatttatgaacatgtgcttcatcactgtagagaatcagaatatatccggccacacaggcgatatgccatacctcggttttcatcatcggggttccgaggcgcagtttgaactacctggacgggcatgtcgtgatcggtgaactcattctactgggacggattctctagatctagctgagtgttagttccggaaatgctcctcgaagggtcgtcttaccatgcacaagctgctcaagaccgtagcacccctgaagttccccatctttcagtctagacagtgtttgacatactgcgtcaggccaattcttcctgtctcttagctcaatatcctctaccaggcagtcaaagatctcatttggcataaagcatggtccccatgtagttggaggataagcaatagcccaagagacaattccatccgggctaagttgttgaatcctagaacatcttttttggaccacacttctcctccattttgtatccttggaatcgaactcagattgcggcgacccgcggtagattaacttcatgttcctgcggaataccgctggattgcgcaaccgtcctccgctgagcactgtggcaattatagattgtgctttgagtctgtgaggctcactgtccttccatgcctgctccatccatgggcgcttccgtaatcctgtttttgattcgataaccacaatgatgtctttgaggtttgcagcgatctcttccaacgtttgcaggtcggtccctgacaaagaaatgtcacgcatcgctaagttcaaggcacccagatctctagcgatggagcttaattgattgatgatggcggccatggctaattttggatacggatgccgaggtttagtagtttgaatggtgaaagttggaagagtcaaagtattatgggccacagttttagagggtgtctaagtttatggctgtctaagtttgatgacgtgtaccgtagttgctggagccaatggagtgagtggtggcatagaggtagggttgtttgtgtagggtgacattttgggacttcagcagcggatcattatccctcaccaagaatatcgcccccaacctattatttcacgtgcccacatcacaatatcgcagcctggaatgataatgaggaagcctcacttaagaacgagctgcagatgcacgcacccttgtcgggcactagcctcttatgtttcctccggcgtgcgcccgagcgcatgccggaatctcaggctgcaaagccacgtcagcagaccaagcagccaaattgacttcgtccgtgtctttcagagtggctgcgcatggtgcaccaggatcatacttgcaggggtgctcctgagggtcctatcttcagcaactgaaatattagattagtgaccgtcattaccataactccgctgaatgccatacagcattttgctccattttaccccaaggtgtcgacaaatagtttctacatagcagagcagtttatgtagatactgttgaggttctaggagcaaacctctccactcctgagacttccaggtcctcgatccttgcgtaggaaaatgtgttttgctgaagttattaatatatgagcccttgccacggtatcggggatgctattccagtgcaccgaaggttagtacaactacagcagcccaatgattgagtcggttatgcctgaagctaccgtggagggtctgaagcatctctccattgtgcttgaaaaggctttgctttgcctgacctcaccaaccatgaacttctctggctaattatcagtcggtaaattccaagagtgtcataggcataagatctaaagagatctaaagctttaccgcttaaaccacggaaatcggggttatattcttatcgtggaagaatgtctggttctggtcctactcaccacctggaaaggcatgatcgtcggggattgcgggatcgattttttcattgtatagaagctctccagtctgggtagggtgtccagaattgacagattgagggtggtgctaaccagcaataacggcggggtccaagtcgcacgatccaaaaccgggggatcgatactcagcactcagacaaacattatcgggtattgtagcagaatcgatatcttcgatgctccgtagaccttccaactgcaaaaggtctttagagtcgaaagtctcgacgtgaggttggtaaaggtggtaaggctcaaatcctccggctcgtgtcgagtgggttgtgcgtcagaatgctggccaccatccaagcaaacctccaacggcgggcgggcaggaaggggatgccggccaggtttgtgggcatgacttttttgactcttggagacggggtcaataggattagagggaggcggggtgggagtcatcgagacaagacttgggtagcggcaaatatcaagagaatctctcagaggctgggctttgtcctgaaaaggattccatggccggaaggattccaggcgaaaactagcgtttgacatactgtgtggaagagatggctgagaaagtcttcaagatgtggtggaagtgggtttgaattacagttttgtcatttgagtggaaccgtagtctctttatagacggtcgcccgtgaggcggaatccgccttctacctagcgcagaaatcccgaccagcccctgcaatccaagccactgcattcaagaggcgggacaacaccagtttcacaaccacgggatgtagttcaccggcaacaattcccgctaccctcgctgatgacatttgcgacgtatgcccacactagtcgtcagcccgttctccattcggtatgtgacggtacgatcgtggcatggttctcgcggttgcagtccagcattggccgcatgatgcagcatctaccgaggtcaggcgagtgtgcgatattttcgctattggctcgcatcaccgtagcatgctttcgaggttcaccgattgggtgcggagagaccggagaggccgacgatgacgacagatgggaggtcgaggcactcgcgaacaagcggccgagtgtaaatctgcgacgctaagggctatgcaatgtaacctcaggtgggggcctgagatggggcggatgaagcggagcatgcagcatcgagaagacttcgcaacaaggggggtcagcgaaataacagacactcaacaggaaggcctcaccagcagaaagcaagcgatctagatggaattagagacttctttggaaaatggagtattgacacacacagtcgtgcgatacgatgcggtgaatggctggatcacctcagtgtttctgctcctgagcgactggatagcactgcagcctacgctggtcagaacgaccagggagtcggatcgagcggcatctctggtaaaatgaaagggggcagtgcgtcgggctgaaagcaaatgtgtagtagtgggtgggggccagagtaaaagaaagggggaggcgatgagtgcaagatagagaggcagaaaaatggaaaagtgagagagagaggaaaagagcagcgatgacgggtctttttaagtcggagagcactgaggggaggttacgtgacggcgtattggggcgctaaacccaaaaaagcaaaactaaccggatgcagtaattcacaggtccctatattacatactcaatatctttgaaagacctatagctagcacagccatatcttggaataaatccatgtatagttcatttcttttcaaatctacggagacaagcgcaagaatgtatacaaccatgtacaaaacccccctccatagaaacaatggcttatctctatgtagctttacatcttgtatttcagagcttgtcatgtggtgaaacgctaaaagaaacccacagcataacctccccgtcggccgtttaagcataaagtttgaatgtcgagctatgcacgagcgaaaatctcggccggttttgaaattgacccctagtatcatagtatatgcaagtaaggcgttctagttggtaagattgagtgagattgatgacagattcagcacacttgtgtcaaatgaggtaaggtctacttcgtataaggctgaagtatagtctgacgccccaccaagtacctatacatacttgcttattctgtcagcttcacttcatttccatttccttgaggctcttctgtccgacaagtgctaatgaagcattcggttttccatggagggcatctgagagtctgatatgtggttgatatatctttccaagggttttcttactacatgtgttacaatatgcctaatgtgtaagaatatatttggtatctgtgagtacaaaaagctcaggattctattcccctttcttccctccacaattgatggtgaagtatcaatgtaaaaagtgcggagtaaattaactgatggaaaaatatattccgcagaattaccccggatattgatcctttgcggggttagacgaactactactagtagatcgtctactcagagatctatatattctactacctagaagaagcatgccatgatatcctacgcaattctaccttcctttatgctagacctaccaatccaattgagtagcaaaaaatgattatcctgacgatatgcgtcctagccatcgcctttggcactattttcgccagagcaagtcctctgtcaagacccgccaaactcaactggtcatcgactaaggctctgtgagtatatctagcctaaatcttgcaagcagcactgaccccagaccaaagaatcgcctttggtgactcctacacctatgtccagggaaccatcggacaccaaaatttcagtttcattggcgaccaattcaacctcgcatatgatgccgaagccctgctttccaacaagatagtccaaaatcaagtaagcttatatcttgacacgattgaatcaaacacagcaccactcggatattaacgtcccacgtctagaccgcaaccgcagaaggcggtccgaactgggtcgaatatctcacaaactgcggcatccaccaaggcctcacctctccacaagactgcaaaaagcaactctgggatttcgcctttgcaggcgccgatatatcaaccgagtagtaagtacaagcacaagtacaatcaacacacattttcgagcaaactcaactaaaaaccaagcacaccaccacaccacaacttcacagtctccctcctagaccagataaaccaattcaagcaatatggccacccagccctcctaaacagtctaccaagcttcacccaagacaaaaccctagtcgccatctggatcggcatcaacgacataaacgacagcgccaagtacgtcgtgaacttcccaaccttctacaaaagcctcatagacacactcttcacatcagtggaaatcctctataacctgggctacagaaactatctcttcatgaacctgccgccgctagaccgcacgccagggaaccaagcaacgaaggatccgagtccgaattcaggtcgggtggtataatgccgcgttggctgatcatgcggctggatttgcggcgaagcataaagaggcgcgggttatgatttttgatgcgcatgcgaggctggcggctatgcttgatgagccctacaagtatggcattgttaatacgacgggcttctgtgctgggtatgatcagccggatattgcggttgcatatgagaagtatgggtgtccgacatcgttagagcggtatttctggtttgattcgggccatatgactagccatgtccatgaggttttggctggggaggtggaaagatggttgcaaggataatgaatggagataggcaatagctacatgcaagcacgttctcaggctgtctaccaataactttgacaagatcgagaaatacttggtggaatgtttgaagaataataataatcattattgcagattgaagtcagagacttcagcaaacgctgtcatgaaactttttaactaatcgacatgtatggactcatcgagagaactgatgaatcaagatccgagactgtgaaaaccccggaggatagagacggaacaaaaactaagtaaaacttatctatgacatcgaaaataacgccgtcctgcccgagttacgcatgaagtcaaaggaatgggaaagagtctaccgggatcgcacaatacaaggcaaagtggctgactgcacggggagcagcagcgaagcatctaccaacgacggttgccgccgacgggagcagagttggaggcagtgaaaccaccaccaccaccaccgccgccgcgaccaccaccccagccaccacggccaccaccacgtccacggccaccccagcgaccaccaccgccgccgccgccgaagcgaaccatctcggcaagacgggggtcaacctgctgcttagcttcagtgaggatagtgatcaagtcacgagcctgcttagagtctagagaaggggatgtcagtacaacttgcgaatgtccaaaacacggacgaaaacttactgtcagtggtgaagaaggtaatggcggtacccttggcaccggcacgagcagtacgaccaatacggtggacatagtcctccgagttgttggggtaatcatagttgagcacatgagtgatgtcgcgcacgtcttttcagaggaaattcgttagcaaatagaacattagtggaaatatgaggagtacggccatgaaggaccctttctccgtcgtgcaggacttgatgcatcactgctctcttgatgggtttctttgaagaaaatcccaagggaagcgaatccatgggatggcggtgttatcatatcctagagaaaccttggaaatgcagccttcaacagttcaacagttcaagaacaacgctgtgtgagagaaacttcgactcttctacgagcctgtcacacaagagatggagaatagagaatcaaagccaagctagaatgcttgctgctgtgctgcactgtgagtccaaggtactcttggcatgagaaccatttaggagaaccatttaggatgaccaaatacgcctggacgcggcgtatagacgccgacgtgcttcgagagagttgagcaccgtgccattgtattacacaacgtcaacacgggtgagtgttttcaagggccccttaaggggggacaagaaggggggaggggaagaggggggaggggtgtagtttgttcataccaataccacgcgaggccacgtcggtggccaccatgatggggcttttgccttgcttgaactcgttcaagacccagtcacgctcgttctgctgcttgtcaccgtggatggctggaatgtacgttagcaccgtacacatgtgtcaattgggaacccaaagaaaacttacaaagcgcgggccagccgtcctgacggaggaatcgggtaatctcatctgcgacacgcttggtacctgtgaaaatgatgcacttattggagcggtcctccataatcttctcaagatgcttgatcatcttgtcacgcttctcaaagtccgagacgacctcgacaatctgggtgatgcggtggttggcggagagatctgtggagccgacgttgacttgaatgtagtcgttgaggaaatcagaagcgagctgacggacatccttgggccaggtagcggaccacatgcaagtctgacgatcagggcgaatttggccgatgatcttgcgaatctggggttcgaaacccatatcaagcatacgatcagcctcgtcaagaacgaggtaagtgacgcgacgaaggttggtacggccagcctcgagcatatcaatcaggcgaccgggggtggcaatgcaaacctcaacaccgcgggagaggtcacgaatctgaggacccttggggacaccaccgtagacacaggtgttgcgaatacgggaggactttccgaacttggtaatctcagcctgaatctggacagccaactcacgagtaggagccaagaccaaaacaatgggtccatcgccgggggcgaggagaggctgagcgttgatgtgaacaatagcggggagacagtaactcagagtcttgccggaaccagtctcggcaataccgacgacatcgcgtccggacagagccatgggccagccctgggactggatagcagtaggagcgtcaaagccctgagccttgacctcagacaaaacgtacgcggggaaaccagcctcgtcgaaggtttcaacgggacggggcacattggtaccctgaatagccatctccttctccttgcggaaggcgataatgtcttcctccgagcgcgcagtgacatcggggtgctccttgtagaatgacttctcaaacttgggcatggtgttgggatctaagtggaaccaaagttagtattgcgtcaacaaacacgcctgtcattggaatcaacttaccccagtcctgagtcttcaggccggcgccgaggttgttcatgcggtcaccaccggcagcaccgccgccgtaaccaccaccaccaccaccaccgtagccgccgccaccgctgtaaccacctccacggccaccgccgtaaccaccaccgccgccgctgtaaccaccaccaccggagccaccgttagagtagccgctgtcacctccgcgagagctagaatagcaaagttaggacgaattcttctgcgatatgcgaggtctctttggtattggttgggagaccacgataggaatcccagtgcccaacgtcataacaaacaactgcaggatcaaggcctttgccagaaaaccgtgcagttgatgagatagacaaagaagacaaagaaaagtctcgatgagaatgaacttaccggtaggagtcaccgccgccgccgccaccgcgagagtagccacctccgtacgacatgattaagtctgcgaagggttgattttagggagagagagtgattagaatccgaggggaagtatgaagtaggaagagaagagaaagagagacgagttcacaagaaaaggtaggaaaaggttgggaacttgaatgaaaaggaaggagaaaaaataaaaaaaaaactgccagggaggaaggcgcgaggaaaaattagattaggcttagcgccctttgtgttttccttggtatcatcacatgaccaggtctggagcaggtgcctcccagaccgcctgcctaaaaagggcttagtcatgactcgccgctttcgtcgcgtctgtctatcttgcttcttattggttgttgttatcgacttcaggcagaaaatttagaaattataagattcaccatggataccaagggggcaaataagtcttgagtggcgataatgtttgacggcaaagtgaggattttcgaaaacaaatagactgagagtctatagataactatttgataatgcatagcagcatgaaatatcactagagaaaacatatcatatgagcgaaaaaaagaactatgggtaaccgaagtgagacgaatagcgtcttgccctatcgtcttgaatcggagcgcgattatcttgcctgggaatagaagtccgcacgtcagtcacctccggattctgaccttcgagcccttgcaatctacttcaaacagttcatagcctgaaaatgctctcagctgaatctagctggacgcccaatttttatttccatagttccaaggtttcactaatatctccatcaatggcaagaaacgtgagaatgtattgtttatgacagatgaaatggaatagacaatggaatatccggacttagatggagtgatcgcagcaactcgtaaattgaacgaggtgtagatagcagcctgagatcttaaatcctattgctcctcacctccgaggcccatatcccagaaacgaatctccaattccgtagctcgaacaaagatcttaatcaattcttccatgcgactgggtgacacacgctgcatgtgatcctctagcaatgctatgacatgaaatgagtcagtgagatgttccactcgttcttcacgatctgacttacctgaacctagtcgcacagcctccgtatagtcgtcggcaacataattctcgatccatttccagtacgtgttccccactcgaagagttttctccgccgtatgcaatcgtcttgcaatggcgccgtatccgatcaagcatggtgcgagagccatttggagagccagccagtcctccgactggcctacatccaaaatgtatcggctgtatgcggtgcaagctatacatatcgagattagtacatctgtcgagtttgtaaaaaggcacgatcggcctaccgatagtttcgggtgtatcttccatctcctgcttggaaagaccaaatgaggcacagtagtcgatgtgcaatgccatttcccgctggatgtggaggacaatttgggccgactggagggattgtatcagattgtccttgaaagcaagtatggtgagcacttaccgctgctattgaatctatgctcttggccttgtatgatgcaagtgcattgcttcgggcaaattgtacctacaggttgaatcatgataagttgaatgccttcttccaaccggattgaagatggctgtctcaccaggtagagataatcttgcacaagatacgccttgaagcgtgcaattggcagtgtgccctggcccatgccctcgacaaactcatggtgggtgaattgccgccatacttgctgcacatcttgacgatccaagatgtattcaataaatcggccgctgaatatcatatcgttaggacttagagaatcaaaagatctagggaatgggtcacatacggcgcaaagggcatagtgtatgtggagtggaaatgattgatcggcccgctcccttgacctaggtcaatgctcgtcttgatccctatctcaacgaatcgcacggcgcttcggaccgctctgatcatgtctttaccggaagccaggtttgcagcaattgccgacgcaagtgagcagcccgtaccgtgggtatttttggatgctaagaactcagtctcaaataaggtggttgtcgtcccatcaaagaggatatccacgactaaagttacttctttcgggtcttgagatgtcttgagatatttcgtcaaaggaaggtgacctcccttgaggaggaccgccttggggcccaatgagcaaaccttcttagcaagatcaaccattccctctaggtcctttggttcggaggtctctgctccggcatctttcaacaagagaagagcctccgggatatttggtgtcagaattgtggtcaaaggaagcaactttgtccgtaattccttgactgccttttcaggtagcaactgagagccactagtggaaaccatgacctgttgatgcctgttagagtgacaatttgagaacaggacattgagcataccggatctagaacaactacaggaactttgtgagcttgtagtgtttctgcgatgacatcaatggtctcagcagaggagagcatgcctagggggtcataggtcatcagtggcagttctagatggaaaaccacgaatcatgaaacgcaaatgacttacccagtttcactacatcggcaccaacatcttctagtccagcattgatttgctttctcacaaattccgaggggacgacaaagatgtcttgcacacctagtgtgttctgtgccgtcaacccagtggtggcagtgagagcatagcatccatgggccgcaaggaccctttgatcagcttcgagaccactggaacttgttagagctttgttctaaatcatgatatagcgtaaatgatagggatacaaggtcaagtatcgctttggagataagttgatggggtacctcatttttttttttctaaccggtttttgcgagaggatatttagacttacgctccgcctgaactgtccgatcctgcaatgaccaaaacccttttgacagacatgattgaaagagccggccagaaattgagaaggatatctatctgctctgcaatggatcaagctgaagtgaagaatgacggagtggggtgggcatccatcatgagaattgggggtggggtgcttaagtaacgataagacagatagatcttgatatggatgaaatattaaacgtccactcgagacatttgtagaccctaaaatatgcaattcgatttaatcatgactatgctaaacttccagaccccaatatccttagatatttacaaacacccaaaatcatacgccgtcggggcatctattgtaacatgaagcggaagagaccatccatctcaacccattgacgaccacacttcttcaggtagctatctaccacccccttgatcgtaccgaatcttgtgcgattgaactctgcaagggcggcaacactgtccttcttttctcctgtctctttctcggcagcgaccttagctttttcgacatcccagagaccggcaaagtagagaagctggttgtatacctctttctccgagtactcgtacgacatgcgacctagacagccttctgcacgacctcggggacccaagcagcggtgtccataaacgctgatttgccgtgtgcgattgccacatgacgaatcgtcacagaccaaccagccttcatagtatcgcgaagtctgttggcggatttggttctccacttgggcgacaattgtcataaccgagaagggtttctggcagctctggttcggacaaacgattccgtgcgcagtgcacatgtgcgatgaggtcaccagaccctcatacacagattgttctttgcagtatcggcatattagggacagtcgcgtagaattggcaaaccgaaccgagtccgggatctgggactcgagcggggtgacctcggcgttttgctgactgttggaactggaggtattgatctgatatttgcgagtatcaagacccaagcactcggcaagacgaacggcatcggtgccaggaattggggcgcagagacgctcaattggagggaatatttgcttgagcatgtagaactcaacatctggcttgagccctgaatcgggcttcagcacatcctgcggggtgtatgatcgcttcgcaggagggagagatgaggtttcagagtctccgttggtcacaatatacgagatgacgtcgttcggtctaactgtcttgccccgggcaatttcgcggagagcgacttgtgccggtggcatgctctctttattagggtactcctggggtcgttttgaaagtttctgatagagcgttagcaaggtgatccagaaaattcttcaggttcatcacatacggtgtatatcacgtatttctgcaccgggattttatattccttcatcctgtctgcaagctcacgcaagtactcgtgaatgttgttgagaacgatttcctgatcttcaccggacaagatttcgttgagtagctttgatgatacctcctttgagagggcacagtattcacgacgcttcatgtcaagacccttgacctcaagtttctccacgtacttgccatccacctcggtaaggttgatagcagcgtacttcttcttggcatgtagtagaagccgacggaagatattgtcgatatcgatttctagaagtcggtaacgttcgttgaccgatttcttgaactcttcgccaaccttgagggcgtcactcatgttgtccatattcgtattgatcatgaccgaatcggtgtcaccataaatgactcgcaattgctggctttcggccaattccttggtgtttctcagaatttcacgtcccttaaaagtggtgagcattgccaaaggacgagcgtaaaatcgactctgtgtgtatcccaagcatccgtacatggaattggcagtcagcttcaatgccaattgttttgtgtcccatatggccagttgttcgggtgtggcacgcttgtctttcatcaacttcttcacttcgcgtcgacgactaaccaacgtcgcgatcaaccgaggtagaacgccttgttcttggtcaggggaggggacatctggcactttttcttcattctcattctcggcctagttgcaaatgttagaaatagaggaaacaagactaggggttggttgggttaatttaccgtagctgttcggtccactgttgtgaagcagatgttgtattcctgaataatactgggatacagactgttgaagtccataacaaggacgaagcggtcgtaaagacctttttcgggctcgaaaacaagaccgcccttgaatttgtccttctttttcttgtcgaccacctcatcatcgtcgccatcttgtattttctcctctgccttctgaagacgagacgagtacttgtccggacagatgtatttgttgcgatgaaactcatgtaacaaaatatactcgttgcgctcggcacgcgtaccgctaagtgtgcgtgcccacgaattacccgcggtattggttaggaccttcgtaagtggcagcatctgaagacgtaaaaccaatgccgcaatgaagtatgtatctgtatcacaatgattgacaaaattcatgagaccttctttggtggtcgcccaggttttcagtgccgcttcggcatccagttcctggcgtacattgccttgaccgaggtagagttggcacatctcagtcaaactccatgattgacatttcatcataagagactagtagctgtcagcattgtgatgtacccactttgaggagaaaattaccttgcccatgtcattggcaacatcacacatcaatcttccagcaatcaactgtctttcggcgaagaagttgccacccttgttgaaattcttaggccaatctccacgcctgagtcggccaatacgatgccatccaggcgtcttcttttcccgcatccggctgagtagaatgcccaggtcgacatcctgcaactgatggcccatgatcacatcggggtccatcttctcgaacatagccaggaatttactgagcaagaactgttcgcttttttcaagaatgacagttccttgctgatttcgtgcttcggcttcaaaatgcattgggtatgatccaccagcagggcgcatgacggtgaatgtcttgcacggaagcttctctggtggagtggtatcagtcagagaaacgtcttcatacacccgggcacttgctattagaatctcctgcttgttctccttgacattgagctgggtacggaaagaaagactcattaaggtcaagggcggggcatccaggttctcggaatctgggacgaggctgatgagagctggtttggtggcctggcattcgaacttgcaccaggatgcattggttactgcagcaaagtctgcctgatcgatcttgagccagcaagggcccattatatttttccagagaacaaactgttcaaacagggaggtattggtaccgaaaacgtttgagaaagtctctcccttagtttccattggcagtgcagccttatcgtaggggtagagtaatttgagatactccgcttcctttgggaccccgggcatttcaaatgcgtacttccgttcgcacggtttcatcttgtgcatgccgactttcagtcttgacatcatctcgtcgacctctgagtaaacatcttgcatgtcaacctcctcttccgtcgctcgtccttgcttgtatcgatattcacgcggcaggaaatagagctttcgcaagatattgtcaatcttaacgaatgcactggtgtatgatccattctgcttgttcttcacttttccgaacagacacaagctgccgttgacttccgtgtagtccagccagaatatgcgcagactgccgtcctcttcgacaacatcctgggcgcgcagctttccaaatgatcgcatttccggagctggactactgaggacgttcaatttgctcctcacgtcattccaagaagcatccattacttctgccattgacttgactggggacgagcttgctggtgtaggagcaatttcacgcttgatcttcgggggcggtcgactgccggtcatgttgatagtcttcgttttaaggctagagtctccagtgacttctgcgacgtccatgaggtcaacatcatcgtcttctggctcttcggccttgaccggtacagtgttcctccgttccaccgctttaataatcggagacgagggcagtatatcgctcatgggaacgtcatcatcgtctgccatcggtagagggccgtcatcgagatcgtcagagtggagtgccgggtccttcattggcgagcttggaatgtgattttcgtcttttgcgtgaagcttctcgcggcgacgcttctcagacagaggcggggagagaacgcggactttgcgtcgggcttctgatttgacaatgtttcgtgtcggggcgtgattcgatacgacattggtgtcgacctctccgagaagatcggccatgaatgcatcgtcctcggcagtagcagcgggcttgtaaaacacttgtcaaaataaggtggttggattccacgagcaaaaagcactcaccttgggtttgggaacagaagccgcagcctgtcctttgttgaagtacttggatatgccattgttaattttctcctttcgctgttgttcctcttctctctttcgtttggcagccttgccccgtgtaggtagttcgtcgctctcgtcactgtcatattctgctgtctgttcgttccatacctcgcggccatcgtccgcgtaacccgcaccgttatcatcgacgacaaaatcatcctgatcaagacgatttcggatgacctttttgtagccatcatcatcaacctcgtcgtagatatcgccctggtcctcaacctcgtatgtggaaagtcgtttctttcctgaggcacggagggccctcagctcggccaacctttcgcgggctgtaggcattatggtttcttcaggaatcactacccattaaactgagttgggtgcctaaataaaagtagattgaattgacgattgttgcggggaaagggaggatgaaaggagtgccgcgccattcatccaggcacgcgaacaccacgcgtcaggtcgcgtttgccctagttaaaggtaaagtttgccggtgagattatgtcagcaccgtaagtgtttctgcctcaggtgatcctagtaattacatcagccattgaatgccttaggcgaacatacccgccctgaggcgatcatatcgtgccctaatatctaagtttaatgattcgcgcaagataggcttcaacatcagaggtggccaggtcatctttccctctttagatttatggtatcaaatttattggaatatatgatgcaaacatacattttaattaccacatgtcattagactataattggctcggatagaggcatatggctgtctatgtgttttgaaacccagccaaaaagcccaaagagaggaaaatatttgcttgtgaagggcgtagttactctatgaatgaataagagactactatgataaaggaataagccaccagtagtataagcctgatatccagggccatcaatatacatacatagtaggtacaatgattaccctactcataatttgatacagctgattcttataacaagtgacctcttgattggcattactaattgacaacagatagttaggtctgaggtacactcagatggtcaatcgatctctcaatgtgatgcatgcaatagtcactaagaccataatattcacagaccgcgatattggcaatctacacctcggcgtccttctgttgtaatcatgatttctcaggtgatgagctacctgcgttttctgcatggccgtactataggtcgctatgttcgtaagtcgctatggccgtattataagtcgctatggccgtaagtcgctatggccgtattataagtcgctatggccgtattataagtcgctatggccgtattataagtcgccatggccgtaagtcgctatggccgtactataagtcgccccggcgatgtaataatttatatttaaaccacagttcggtccctttactactttctctttcatgttttttcctctcctacttctctggctatctttctgtcgctgtgagactatacttctttgatcttcttaccctcgagaggtgttccaggttcagagtccgctgtcatttttctcagctctcacagcatgccggtgagttcaaattgttctctttccatctagtgatttctttgtttctagttcactagtcgctgtggtgtttcatccaccccgtcgcatcatggctcgtttaccagtcacgtccacgaactatgggttgcccagcagaacacatcaagttacaagacacgacttgttagaaaggactttggtaagtcttctaccttgcagtatgccggtgaaaaattctaactggtctcctttgcttcggtaccatgcatgtcgcttccatctatcactccaacgagccatggcttggccatcagaacatagcaccctttatgagacagggagcacatggaatagattttgatgagcattctactcacttgccacgattaaattaatttgactaattctcaatgcagggcatccctcaataccgtcagcaaaattcccacacacgtggcagctgggtatgtacgatggacagacagaattgagctgtttatttgatgtaatgtgacaacttccatttctcgtccaatggcattggcatcccgcaaaatgatgacagttactcactacacagagctccctagtctttactctaagtatggactttgaggacaagaggtgacaagaacagtctgatgcgagactaactatctatctaggtcgcttttcgtatcgctttttgtacttcttactcctcactctttataggaactttatgatagcgactcggctattcaaactgcggacgcgttgatggatttgccaattggatcaaggtatgtcctaacccgtttttgtctaatgatagtcgcaaaatgatgagaattcttactacacaatatggagctccctagtctacggactttgaggacaggaatgaatagaactctgatgcgagactaattaccccaatcaactacctaggtcagatttcgcacttcttgctcctcactctttgtgggagccactcgactcgagctacggggccaatgtgcccgaaagcgaactctcgatgaaactgaaaggatcaagccgatctgggtcaagataaaacagtacttggtttgatccaactgtttgtactatggaataatgttcgaatatttttgctaacactctcaagaacctaggtgtgtattccattttcacttctcgatatgaacctcctctcattacacaagcaaatgaatattgggctcgatgaacccgaaagcgcatgttatgatgagaatatactatggaagtgaccgtgcctcgccaaatgactttccaactggcttacatggtcattcaaggggtcactggacacggtgaaaaggaagataaggactctgataccatgcgagacacaggatattgctttcctggctgatattatggcccttcttgatctgttttgatattggaaacttctgctaataatcttgagatcttctaggtttccatactgcttccaaccccacaagcacaattgatactcggtgccacagaaaggccatttcatgatggttaaaaaatattacactttgagggaacgtggaccctcggagccaatggactcagtgataagtttgaagcacatctgatacaaggcgaaaataagtatatcatttccctgactgatcttgcacatcttctgcacttgctacgttttcttttcttttcttttttttttcttttgacactcgtgatatctagattatcccataattactttcgggtgagactcaatatggctccaatggattcctagcagaatgagcatctgaagtatcggtcaatgaggactactacccaatttgaagatgacgatgaccccgagttttcgagagatcaacggacgcaatcaaaggttgagattgaacactggtatgagttgaataaacaaaaacacttgactttcatgactgacccgtctgtcgttgtgatccaattccacattgggtcttctagttcacactttcagatcaaaggatttcgtctctcttattccttttccatgtaaactgtatggcttgatacaagtaccccgaggattcgaagactagtatctaggggatttgaacatccacggctttcaatggtccgaggggctacagcaacctgcctgagacgcgacaaatcaaaggcttgattcggactaagccgctggaaattctgttttccttgttcgatcccaactccgtgtgttggtatgcagctctctggctggtatgggacgaagatcgacattttcagagtatggcacaatccttctcacgttgatattggaatctctcgactaattgttccgatgtaccactttagattgccaatcacccattcaggtatgacctgacacattcttttttcatctaatggcaattgaaactcgcacatgatgacgatttatcactacacagagcaccttagtctatactctcactatggactttgaggacaagaaatgagaagaacagtctgatgcgagactaattgctcctcactctttataggaactttgtgggagcgactcgacatagtcgtacacacggcggatacattgatggattgctggttctggatcaaggtatgacctgacccttttttctccaacgatgatcgcaaaatgatgacaatttctcactacactatgagctccctagtctacagactttgaggacaagaggtgataagaacagtctgatgcgagactaactacctatctaggtcgctttttgtacttcttactcctcactctttataggaactttatgatagcgactcggctattcaaactgcggacgcgttgatggatttgccaattggatcaaggtatgacctgatataccccgtttttgtctaatgataatcgcaagatgatgagaattcttactacacaatatggagctccctagtctacggactttgaggacagcaatgaaaagaactctgatgcgagactaattgctcctcactctttataggaactttgtgggagtaacccactacggacacattgatggattgctgattttggatcaaggtatgacccgatatgtccctttctttttgtctaatgataaccgcaaaatgatgacaatctctcactacactatgagctccctagtctacggactttgaggacaagaggtgattagaacagtctgatgcgagactaattacccatctaggtcgatctgcacacttcataggaactttctacagacacattgatggattgctgattttggatcaaggtaagtcctaacccttttttgtctaatgataatcgcaaaatgatgagaattcttactacacaaattagagcttcctagtctatacggactttgaggacaggaatgaatagaactctgatgcgagactaactacctatctaggtcggtttacacacttcctcctcctcactctttataggaacttagtcgtgcatactgcgcacacattggtggattggcaattttggatcaaggtaagtcctaccccttttttgtctaatgataatcgcaaaatgatgagaattattactacacaaattagagcttcctagtctatacggactttgaggacagaaatggtaagaactctgatgcgagacttattaccacattcaattacctaggtcgatttgcgcacttcttgctcctcactctttgtgggagcgactcgacatagtcgtgtagtgactatggatgagtgcaaagctcgcgaatgatgaccttttatgtcttctttatttggtgacttgctttggcaagacaacaagtagagaaggcatacctgacgcgaggacgaatatcaagagaggtaagttttccccctgtcacattttcattaacaattggatactttaacgtttttcgagcagtttgaaagctcgcgaatgatgaccttctatgtcttctttatttgatgacttgaatgcatacctgacgcgaggacgatcaagagaggtgaggtttttatccccctatgcttcatggcaacattttcgatcagtatgttttgacaatatcgagacataaggagagaggtaagtttcctattcccctgttcgttgaccatgatcttttaaaggaatatccctactctcatcatcggatggcaccacacttatacttcagtggtggtcgaggcaaggcaagtcttccattccctcatttttatggacgttaacagttagttttgagagaacctttccaagtggatcaaccttcaaactcccaaatgatgaccgtttatcccttcatttcgaagattggcatgagccccaatcaaaacgaaaaaaacttctgatgggagctacacaaggtttccactacagaggattgatctctcgaaagatatgtcgacaacttccctatatcttggctgcagtgcagttctatatctcaaatgcgaagacgcctgtgcttcaagcgcgattgaaatgaacaaaggcaagttttcccttcccctgcatttctgtaaatgctgatttcgggctttaaatgaacacacgtctagaggatgaatctatcaagtgagtgagcctcgaaactcatatatgatgactgctgaattgttcaattgagtcgctatgtcgaatgcatagataggtattggcattaacgagaagccagatctcgacatagggtttactgagaaggtacgttgggaatccccttatgctggtcgaacctgatgacattttcaatagtatcccaagtggctgagccttggaactctcaaatgatgactttaacgttcttattccgtccaagtgactgcattggcaggcatcagtgaaagacaaaaaaaaatctgatgagagttcaatacaaggtcgagtcgcatagcactttaagtgggtaatcccttgacctacagatgatgagcttacaccgatcatatgccttcctacagaatattaccccaacggggaaagagaagaatttctgattaagagaaagcgagagttggccaggagaagacattgcaattcgcctactttggtgatgactgagtcttgtatactccggatgaaaatgtaagctcacattgatgcgtatcaacgatgacgcaagacaatatctgactgatatctagtcccgggctgctttcttgatactggcgaagagttattggagaggttgaggagcatttcaagaggagttgttgcgggaaatgtcgaaagagagccgcggcactggctgtgagtgccagcaattcttttttcatgtatgcatggattcatgttgctcacaccatctggctacgacatggaattgaaataatgtccaattgaactgaggtttggcggtaaatccgagtgacagatagccaatgtccggggtaaacttgttgtaagtatgtaaagccatgaattctatgtggtccagtatgggagagcgaggtgcgaggacctcggtggtttaccttcaaaagcagatacttgccaagttggcgtatggagaacataaatctgggaaaaataagaccaatgttgttagaacactatagccaaaagattccaaaacaaaggcttgaacaagataaaacccagtatcattgagtagattttcctggctatgctaggtatttttttccagccgtgcaggacagcgccagtgaaaaacatatcaacaaggcaccggaacaacaaccagaggttattttcccaaattcctctagcccggtcctcagatctcttgcaagagcggttaaaccgaacaaaaaccgctcaaacatccccgaatcctcccaagtccccagtccaccaagaagtcatggaaacaagtcgtgatggaaaaaacatatgaagacagacatattccatttccccgttgccgtaaacttttctttcccttttcgccgcgtaacaagtgaggaagaaaaatttaacggtaggacttctggtaacgggagcgggcaccgcgaccaccgaacttcttgggctcggcgcgacggttatcggcaaccaggagtgtgcggtcgtactgagcaagagcctgcttcagctggttcttggagtgctcatcgacgtacttctggtagtaggcgacaatggacttggcgatagcctgacggatggcgtagacctgcgaggtgtgaccaccaccggtaacgcggacacggatgtcgacaccggcgaacttgtcaacgccgacgatgaggaggggctcgtagacctaaaatttcgagggtgaattgtcagaaaccgagttcgtagacgttttcccattgccattgtcgcttgcgattcgtgcgaatcttttcgtttgtggcgcacgggaggtggttgagcgaatgtattgtgcgtaccttgaaacggaggatctcgggctggaccagggagaggggctggccgttaaccttgacgaggcccttgccttgctgtaaaaagtctcagcgtgttgtccaattcaatgtgtataagacccccatgatcgcgcaacatgttgtttcgtatatcattccaaaattcaaccccagttcttcgtttcgtgcacgattcctttccgacaatttcctttccagacatttcgaaacaacgtattgggaccgagagagtagaggcgttcatcataccttgcagtgggcgacagcggtggctattgaaaacgaaatatgtcagcgcacgggttcattcactctggtctccggtcgaaaaaaagagagcttacccgtcttcttcttgccgaagcattgcacactcgggacggaagccatggtggattgtcgtgggggagggagtgtgttgtcgagggagatggaaaaagagtcacttgaattcccatacacagtgatttgcccttccgtgcgggtttcgcttagtgtgcgacgctaattctactttgggactagcgtggcacgagacttagggcttggtcacatgaccggagaacttcaatcggggcgggttagaggctacaagcaatacagggaacgctgagatcatcattatctctgacatttaagcgctgagtctgttttggttgctgggatcttcaattgaacgactccgcctttcattaattgtctaattgtccatcgccccggcatatacaccaccctccgccgcgtcaacaagatgtcgcaactcgtcggcaaggtaaatagtttcaatgcggagccttccgggccaaccgcgcatgccctgaactcaagcaagcaactcgattctaaccagtaacgcatcagactcgtctcgcctactcgcgtacatggcactatgtcgacgccggcaccgatgaacgatccctcggccgcctcgcctcgtcgatcgccctcgtcttgatgggcaagaacaagccgatcttcgacccttcaacagactgtggtgactatgtggtggttgtgggatgtcatgatctcaagacaacaggaaagaaacgattccagaagaagtactacacgcacacgacacggcccggtagcttgaagagcatgacgatggatcagatgtttgccaaatggggtggtggtgaagtcctgcgccgcgctgtcaggggcatgctgcctaagaaccgactgaaggatgcccgccttgctcgattgaagagtaagttctagatttttatgctcctgctccttggatgggttgcttgattggtggagatacgcacgggttcatcttcgaagaacaacggggacactatccatttagccgatctacttcttcacgttttgacccagtctaacccaatgtcgtgcagctttcgaaggtgtggcccacccctacaaggaaaatattgtcaagttcggcaaccaatcgatgatcggaaatctgcccgaagtgcaggaagcattcaaagaagccgccgaaaagccaagcgcataaagcacccttttttatctctccttgtttcgttattttagagcgccgacctaaaccgggtccgtgtctacctgtattctattctcctgcgatgttatgatccaaccgcacaagcgcatgggtgtggagtccatttgggatattgcttttgattatctactctgttggcctcggacttttcaactttcgagcctgcggttcttttgaaatgtacttatagcacatacaatcacaataccacgtactatacaatgcttttttaccttatcttttgcgatgttgtgacggattggattcgagatataaagagtctgatcccagaagtataggaaatggatatatgtacaaaatagaaaagaaacccaagctagcgcccatgtcggagctcgccgacaatcctttagaaagcatttacagcttagcctttgggccagcgcggccaacggtgcacttgataagaccgttggggttggattggggggcgtacaccgaggcatccttgccggtgttcttgatacccttgtgccagctgagatctacaagcgcagaggttagcccaaatccaagattcacaggggagggggtcaaacataccaacttcgaagaagtggatattaggcaacgcatagtcaacagtctccaagagaggctcaacagcaagaatctgctctcccatcttgtacatagtcgcctggacggaggcactgttatcctcagcaaaggtcttgagggtaatagcgcgggccgcctcccaagcagcattgaacttctcaacgtgtgtcttgacatcggcaagaccagcgaagcggcgccactgccagtccgcggcgacatcagtgctgaggagacggtcccaggtctccttgagggtcgtgtattcgtcgcggacgaaaccccagaactgggaaccggtgctcttcagcacggtcaggcctctgatagagcttttgatgtcgatgccctttccttcgatgacgtcgacttgcacgttgcgcgtctcggagccaggcttgataaacgagtgcgggtgtggcttgccgtcgatctccatgcgtacccagcggtgggtaacgatgttaacgtgcgccgcgtggatgtggctgtacttctcgatgaagtgtgtgcccaggatcgagccgaacagctccggtggggatacggggttctgcttggctgtgatgaagacggtgttcttgattgagtcggttgcgacaacgacgctgttatcggccttggtgtaactgtggggaccttcaggttagcttcaactttttttctctcgataaaagatgtcgattgacatacgaggtctcgatgtcgccctccagcaggacgcatacggtcatctccacgaccgtctggatgccggtcttctcatcgcggtccaccttgcacacgcggacattgtccttgccgtagcgagcagctgccaatacgctcatcttgaattttgggagggtaacttgggaatatggaagagaagaagaagtagagtgtgaaagttaaatgattgtattacccagcagacctgatcagtatttatctggaatgcatattggctgatccagagagcatcgggcacctccgatggccgcgatggccgcgagtggccgcgatctcctccaaatcccgatcttatcagttggcgattggacagttcattttcttcctacctttatgtagctatggcctgatgcttctatgccattctcacctatcaccatcatatgttgtaccgaaggagaagaaaaagacaatttcctttcccccagactttcgggccacgagccgagtgcagtgacagtggagatctcacattcccaatcccgaacttccgaccactctgcggacttcaactgcaaatgcctagattattttcaaatccctaacatctctaacatccctaacgttctgtataccatccggagacctccactgcggaccggcgagctgcgagccgtgaaagacgaagttccggcgataaacactcagcgctgacatgatattcttcctctgttgacaattgccataataggcatgcgcagtgacctcactgtcggtggtacagtgcggggagaaatatggcacagtctgtacgttgactcgccttgatgacgagatatcgtggcatttttgttctcttttgttcatttaagtactttgtacggaatacaccgaaggtatttcatggttaatgctgtcctacttcaatcgtccagggtagcttgtatatataacctccgtggtgtataccaggttgctcatgcaatttctatcagaggcaatatatatcttcagaggtagtatatatccccccagacaacctacacgtacaaacaccattagagcgcttatttccgatgaacagccggagttaacactgaagtctctccaagactcggcatgaaagagcctcaatacccacagagcacaaaagagtacctatacatacaccgcataggggaaatgcgtggcctacgcctcctgtcacagcatgtgcaagtgtcaagcacactgacctatctagcggtcaacgatgattgccatgagggatttgatttgcttctatatgagtgacaatattacccgaggtcatcatgtgctcaaccttgctgccaacgctccgaccaaagccaagtttcatctctagacagggaataatcaagatatttaactatgcagtctctctcgtacatcctagaccccaatatatgtccaatcctcaacacccatgcccagaacgacagcatgtaggatatgtatcagatccagatagcagattggattctttttttggaataaagaattcacagcgtgcattgaatggcacgcctggtccccagcttagattgcaattgtcgaatcggagggtgtggtgggtgccaatgctggtggtatcgtctgcaacgtcgatctgacgaatctcgcatgcagtgcacacttctaagccatatcaatcagcataatatcccgcgattgggtaaattgtcgagtaaaaagcgggcgaggtctatcaggttctcggtcaaggctgggctgattctttgttcaacagggagtcgtcacttgcctattacgtctggcacttatcgactaatttctggttttgttgattctcagctttccctgaacttctaattagtcacacctcatattagtccgttctcatattagtgattcggattcgcgagggacttctttgtttccatctgcaggcaaccgctcgcgtttcggataatcatgactatacgcgatctaataaatctcaagagagagccagggaaaaatcgtgctccctggctgttgaaggttcgttcctcaacgggttttattatcggtgcagtctggatgtccaccttcacggtatgtgagagtctggtcctctattcttctaagtccccaactgagactcaattgaaataaggaattcctcctgtatgccatggtaagcaagatcttacttatgatgtgagttgaacccagaaccaacgaacgacagatagtccccgtgatgccaacagcactcgtcacccgagccggagtcggattcgagcaccgtatgtctaacagcttccctggcaaactattgcatactaacctttgaccaggagaatactgggtcagcgtccttctcatgtgcgaagcaggcatgtctctattcatgtgtcccatattcggctacctggtcgaccgcgcacgcacacgtcgactacccttcatcagtgccctggtcatactaaccggctgtatgctgatcttacaactggcgcattccatcgctgcgtttgtcatagctcgtctactccagggcattgcaggtgctctagtagtggtatcggcattcgctctcatcggcgacgccgtgtcccaggagcatctcggtcagacaatagggtatcttggctccgcgattgcctcggggttcctactgggtccgttcctcggaggcgttgtgtacaattcgggtgggtacaacgccgtgttctggtttgcgtatcctattcttgcgcttgacatggttatgcggctggttttgatcgagaagaaggtggctgctcagtggactggagaatcaaacgggaacctggagtcggatctggagacggcgcagcgtattccctctgtcggttcgcgcgaaccacaggtcatccaaagaaggaaagggctcgttatcttccggatgctcagacagcgccgagtgttgatctcttcgtgggcgctcctcgcgcagggaatcttgctttctgcttttgatgcggtatgtactagactccaccttttcaacatgaatggttggctaatcacatccagactctctccatcttcgtcgaaacgacatttggctggaactccctcggcatgggactaatcttcctcccaatggccgtcccggccttcttcgagccgctgttcggcggcttcacggacaagttcggtgcccgctttgtagccttcggctgtttcgttcttctctcgcccaccctcatctgtctccggtttgtccaggcaaaatcgaatgaacaaatcgctctgctggtatccttgctcttccttgtcggggtcttcatccacgcctgtgcaccagctatgtacgttgagacgcagcgtgcactcacggcaatggaactcaagagcccaggcatactcggatccaagggtgccgtggcgcagggattcggattgcagagtatgtgccagtttgctggggtgttcttcggaccactttggggtgggtttgtcgagtatcgtttcggatggggggcgatgacgggcacattgggagttttcgtagcgctcactgcgcttccgatgctgtggttaggagaaaccgaggaggagagggctttaatgagctgaatgagggttacgcagttaggcagcacttttttcaaattattttttccaacgcaggtatcagttctgcctacatgtaagcaagtaggtcacttcggaactatacgttgcacctggattacctaggtatagtagcggctttacaaggtgcttatctttgatatatttgtatgcctagaatctctggaatcttttgtatttcatagcctattatagctgcaatatatgtctgggtttgtgtctctcgatctatcaaggtatcctttagaggccgagaagtgaggagttgcgcgaggtgcggcatttgattctatacaaattttatagactagacaccaggagaaaccagataatgtatttacacagtgttacctttatttagatccaggaacatatgataaattcaattcctctactccgtacagcagcaaaccgaagttcaaaaacggttagatccatataacaagccccaccacggtgttaagcttatcgcctggactatcccaatgcggcagctcagtcgttctcttccttttaacttgtttaggctcatcgtcgacattcctctcatctcctcatattgactccattgggatcttcccttcagcataaataacccccaattcgccccgaccattctccccatggcacttcttcactcgatccaacgactaagacaagcatctaccactgtcagtacatcagtctgtcgcattctgtaccacacacatgtgatctaacccatccagatctccttagctcgacctcacctaccggtcatataccaatacaaacccccattccaaccaacccacccaacagcaaccatgccgcccaccaacaaaatctggcacatccagcaccgcgccctctcactccaagcagacagagcaaagcaatacatccgcccagcagaaacaagcacccacctagcaaccctcctaagcttcccctcccgccgctcgaccctcccagagctacacgccaaaacaagcaacgagataatctccctcgcgaccacaatcgcagccttcgaacccgtgcacctctacgcccgatctgaagacatcccacaagcccaagccctcctcgacaaacaaccccagcaccggtccaacataatcctcatcgcagcgccaacaaaccactgctggatccgcgacacaggccccgtctacgtccacagcgccgacccagcagacaaaacccgctacgcaatcgacttccgcttctgcgaatggggccacaaaaccacagaatacatctacggcgccaacgcctcgcccgcagcagcagaggcgctcgaaacatccccgcaatacgccgagtggccggtaatggacgcgcaagccatgagcgagaacacggcgttcgcgggcgtcgtgctggatctcgagaatgcgggcgcggacacggtggcggatgttgtcgtgcgggtggagacggatatccggctcgagggcgggggtattgaggtcgacggcgaggggacgttcatggcgacggagagtagtattattggcgatgcgcgcaatcctggactcgggaaggcggagatcgaggcggagcttcgtcggttgctaggtgtcagtacgttcatttggttccccgggagggtggggctcgatgttacggatttgcatgttgatgctgaggcgaggtttgtgagacctggggttgtggttgtttgtcgtccgcatgagaaggcggagaaggtgcgttgggaggtctattcggagattcgggccgtcttggagagatctactgatgcgcgtggtcggcgctttgaggttcatgatgttgttgagccggatccgagcttcgttcaggggggtcttgctggggaggaggaggcgtcggcggcttcgtatgtgaacttttactttgttaatggtggactggttatcccggcgtttggggatcctgaggctgatgagaaggcctttgagttgatgaagagcctggttcccgggagggaggttcgtcaggttgaggtcaatgccttgcctaggactggaggtgtgctgcattgtgttacacagcaggtggtgtgagggcactagctagctgcctaggtaaatatacagaatctgatttttagaaacggtcaaggaagaatattcaaagatgtgatattgatagtgatgttgatattgaaaaaagaatgtttttgaccatagacttgctagtgtggaaaataaacagaacggaaaaagagaacggagagagagaagtcgaaacgagagactaaacaaaccccattcccacgcagatcataattcatgtagaatagtgtaagatgtatgtcttttttgggcttcttttgtaccagcaaaatggccagtaagaaaccaagatccccaactggaacctgatatcatcctccgatccagattccagacctagaccgatatcagagaacgcagggaagaaacgaagaaggaaaagaaagaggagaacaccgtcccaggacgcctgataatgccgcgccacgaagcaaagagaacgcggacgaaaagaggccaaaaaaaagaaagacgcatagaatccgtgatggagcagtgtcagatattcacatccgatcgagcatccgattgcagtcccaggatgatagccagtcaacccagaacagaccgaaaaccaaaccaaaaaccccataagaccctctcgggaccccgttccccccacatcacgttgatcttatatctcaaagactcaactgatcgatactccccacccgcccactcccgccaagccgccccccacccttcgtaaccatcccgagtcgatagaagcgctcttcgccagcgggcgtcctcccaccaatataccacttctccggaccgatggcatcgcggaacccgcccgagccactggaagaatcactcccgcggcgctggcggtctgctgagccacgattaatcgggatgggagtcgaggtggatgatggtggtgtggaggggagagatgattggtcgtggtgatagtggtgtgaaggggatggactcgggccttggacttggccggctggtgctgtagtcgaggcggatgaggatgtgtgggtgtggtggtgattatggtggttgtgagtgtgattatggtgggctgcggcagaagcagatgatggtgctgatgagccttgggctgagttggctgcttttgttgcgatggcgcgggcactctgggagatctgggcggaggaaagggttgaggttgtggcgccgacttgctgggcaggcttataggttgactgggcgcggaaggcagccaggaagttggcgaggaatggacggttgttggacatgattagacagggagaggattcacctgttgttgattttgattatggaatgtgaagatgtagaataggagaagtctgagagtgcccgatctcaagttcccgatcccacgggcgctccaatcacgggcggcggattatggttatgacgttacataggaagatcccggagacgttatatccatttctccgctactccgctacatcttgtatatacaacgtatcaattgaagtatagatttgaagtaccttgtgaacgtcttctccaaggtaccccggcttccccagatactggcacgtcaaatggatcataagtctatttctagctgcttttctagtaaatcctgagaataaaacaaacaccttaaatcacacctcaaggaattcccaaagcacacatatgtcctgccatgccgactttacatgagaaaagaggccatgcgatgcagaagaaaaaacgagaaaggaaaagataaaagcacatggcaaaaaatggactgcaagaatgaaagaaacatggcaattcgacaacaaccatcccataaaaaagagaatgtaagaaaaaaaagcttttctcctttctgatgtcgagcactcgcgcaaaagatgaacacatgcccatgtctatgttgtggacgccgaacaaaccaccataccatctgcccctcacatcgggggttcaagataaaagataaccagactcgcaaaccacttaagaatgcacacccacaccggatgggatcagaatagaaaagaaaagaagatagatcgacaaacgtggaacgggagacgctagatcacgaaacaccgcaagctgaaagccgcaagcgaacggatcaaaggactaccgtaaacagatttgttgaaacatcgtgaccagtggatttgcaccagcggagaagccagggacgaagccctagaaacaatagaagagagggtggagagcaatagtcctacccacggcgtgaagaagagaggaaccttttgtggtattttacttagtcaaaacgctttttcaatcttatgcctaggcatcatcttgctttccgaattcaccgtctattgtctcgcgggctgtacactacctgcatattttttgttagaaaccgatatcataatcaacggcataaaaaaaaaaaactaaccgtctccgctcagcgtagtcgaggcaaggtacagtccgttcataccgctctcaggaccggtcgaggcagggtagtacttgcggtcgtggtcgacgggagcgtggatcggctcctggcccgcggccatggagtggggaaaaccggggttaatgtaaccgtcggaggaaccgtgctgaaacatcgaattccagtcaacacccgggtgatgtgagtggggaccgggcatgaccggcttgtggtcatggtaaaccgggggctttacctgttcaaggggacgatcacccgtcagctgctggccatgagcatcgacaccaggctgcatgagatacgggttctgcttaggtccagccatccacgaggctctcgcgtgcgcctggccagcggagaacgcgtcgtcaccgggaccacggttcatgccgttgacagactgcatcgtgaaaccgagcggctgctgctccgcgtagctaggacgacctgtagccattccattgccattcacggccccatcgtattgcgtacccataacgccattggagtgggggacgggattactgacttcatcctggagcggcttagggggattggccgcggcagccgcagctgcttgctgctgagaccgcttcagatgggcctgcgggtgggacaagtgggtcgctccggtcgggttaccccgtcggatcgagcatttttggaagtgacgcttcaagatatcactgcgggagaaagtgtccttacataggacacacatgtaagggcgatcaccagtgtctatacaaatcagacagtcagcacatctcgtcctaagggaatttttctgttttttcttctttttttttttttcttcgctctaccgaaaacttacgtctcaacaaatggcgcttgaggtgcttagcgtggaggtaagtcttgttacagtgcggacaggggaatttgccatccgcgtcctttgcgggaatcgtcgtgctcttagctgtaccattgacaccgttcgaaaccggagtcgcgcggcccgggacactcggcaaaatgccacggcggccctgagagcccacgacctgcgtgcgtggcggttccttggcgtagggggagccgttcgcgccattcacatcaggagtcataccccaacccttgccgtcggagtaactaaaggcaccggacggaagaccattgaaatccgggcggcgatcgcgggggggtgccggagcaatcggctgagggtagctctgagcggaggatgcgggcggaaggacactcggaggtggggggtactgctgatgcgcctgtgtttgagggttaggaagattcaacagagacgatggcggaaggctaccgacagtcgtgtgcggcatcatcggggcctgggaagccccgtagacatcgtgagttgacggggggtaccgcgacaagtccggacggtacggctgccccatgtagtggtgaggcgcgggagactgatggtggtgcggctgcaatggaggcagagtatgcggctgcgaaaccggatactgcggctgcatcgagtattgtgggatatgcatgctcgagatgggagtcgaggacatgggcgtggagccgggaggcagactggtggatggaggacgggaagggtgagatctgggatccattgtggacagaggagggagatcgtgtagaaaagaaagaaaggatgttggttcacggtaactcaatcatcaaccctgcactctggatgattttttttttctttgaaggaaaggaagctccttgtttgaaaattttcctgcgaacaagaaagacagaggcaaacggtcacagggtctcacgggattcacgggattcagactgagttgactccacacgaagagagaaaggaaggaagagatgcttaattgaagaagattccccacggtcacccactaggaagaaaaaaataggatggtgatttatccgcacgttgtgacaaccaccgtcgatggttctgtatccaccgaagaagcgggcgtacaagtgggtctcttctctcgcagcaaaaacaactagtccgagatctgcttcgcgtcaaggtaatccttgagatcgaggaattgagccaatagaatggaagtatcttaaagaatggaatagaggaattgaagggttcgagaacagggaattgagtgattgaagatttgaggattgagaattgggaattgggaattgggggaaattggggaggaaaagagaaaatgggggataagtttcttggtaaagacgaaaaggaaaattctaaggaagaccggatcgaaaaaaaggaaaaaggaaaaaaaagaccgaaaagacgagaaaagacgaaaaaagacgatcgttcctcggggaggcaagaggcgacagacgaaaaagaaaatgcgaaaaaggaaatgacacgtaattaccgtatttttgcacttgccagttccaaatttacacggccgtcttccgaagtatggccgatagcggtagggacgtattaggattgttgggatagatagtttggatattgaatattctattattcggattggattgagaataacacgaatagcgaataaccagccgaatcactttacacatagacacatagacacgtacttcagcacatcgccatctctcactggatctgcccacgtccgggtacgatgacgcacgtaaggtatatcccatctaatcacccgtggacggatgataataagtcccgaaaccattgaactatatcatatgcaatccgatgattccagagatagtagatcgatatatcgtgaactttgtatgtatgttgtagaacaaaacacaaggttcactgcgatatgctacagcccaagtcgggatccctccgatcgcggcgattgccagactaccattgggcagaccgctaacactgccaactattaacacatagatatgccgttgtgtatgattatctgatgttggagtagatcttattatatttggagatggagccatctccccgaatgtggattgtggttgaccctggctcttctttgttttgggctccgcagtggctgacagccccgcaagtgacatctgatatgtattcaaccattactctgcggactacggagtactctatgtctatatatctttgagctactccgcagggaatataatgtaggtagatgaggtctcagactgtataattccacccttcactaatctcttcaaacacgttattcaggggagccagaggaagagctccaatgagctcgagctcgacctcgtcatacatcctctgttgtactggatttggctcctgcatgcagtctagatgtacatggccatggcacatctggcacatctccagaagaaggtgcatgcgttctcaggctcttcctggaagactggcgaccggggcttctgtaacggccatgcagtgttgccgtagagtacttaagtggatgcgctgtagccgctctttgcactgctttccgcacttagcttgggactcgaaaaacatgacgcgaattgcacttcgtatattgtacataaaagaaaacaagataaagctatcaatggcacaagtctaactgggagactattgctgcctagacaatatagagaaaaaagaggagtccgaagtagagtgtttttgctcagttcagccacacaggaatgctctagacgaatttggcattcagggggttccccttattggacgtggctacttccgtgggctgacataggtgggctgcggttcgcgtacttttgcaatgcagatttcttattctattattaagccgatatctcgaccgagtacggagtaacatgacctaaagtttcagatcctgcgcgccattcgagtcccgtgtgactaaaaacatacgttggtcgcattgagattggatatttcctcaacaataacaatataccttggatagactcaactatcaacatgcaaagaatctacatcgcactcctgactccttactccgtatatttgccggtgatctgtattccggacccaacatccctgcccctcctgctccaccccttcgcaagagcttctcccgcttcgattgtggacctggaaggcttcgaccagggttctgcagaaatattgaactgaccacctgatcttaactttgtgcaccctactttgggtgttcatggagagattatccttcactattttattatactgacatgtgcgaactcagattccgccgaggggcgagcgtgaattcaagctacgacgtaaaaggaagttcgcttgaccttccactacctcggtatgtgtgtacgtgtatatcagtccagtcaccgctagaatatcgtgtacatcctaacagcgtcaaccgaattagctgcatatcctgtctgttgtcctatgtctcctaatgctgcctaaaaggatttcgacaatcaaggaaaaagaattcgttcttggtggcttgaacgcggtgtattgaagtagtaggtggctgcctctactttttgcaaaatgcactcggcatcaatgccgggagttaacggactccactccaaagccccccgaaacggttctcaaagtacggtgaggcttttcccgagtctttacatatggaatcggatcaggggctgtcaattcatttgttactaatgttttcttagtctgttactgagaccagattgttgtgttaagactagtcggtaccaacaagccggagatcgtcgcttggtttttccatgaagagcttgaccgtatcctagtcgaataatatgtaccaaacccactaactgacatggggccgccaatagagctaaattcccggatgcttaaggtgctgctggcttcagtacggagtacggagtagcaaccgggatagaagagaatagcgcgcgcgagatgtagatcccgccccagtctccatcgctgccgaatagcatatcacgtgtgatatagggttgtgtatacaacagtggcattatttaaacaaagaatatagagcgataaaaaaagaaagggacaacacgtcaacgtgttctacacgctctatacaacgcacatccgatagcgctccccaacatcatccgatacacacaaaaagccagcgttgttctcggcatatgccggaaacaccgctgaagctaagtccggatcgccgagtttcaggaatccacgcagccaatcagggacgaccatccggtgcagcgggggagaggatcgtgccaccaccaacctcataggctgccgatgtctgtagtcgaaacccagatgggcatagcgtgttcttccacacaaggtcctcttggaggatctgacttgatattatttgggatttttgatcggttacttgcgggctatgcgatttggtttctcgttccgtctacagagaatcgaaggtttgatgttgactttgaaattgactttgagaactgatatcaagtatagtggctaccgtcccattctccctttctccatctttctccattttcccatgtgttctgtggatcggaatccattcgggtacaacatgggggttatggggtggctcacggtgatcaggaacgaattcgctatactaacatagtacctctgtattcttccatgttccatataagtaattgccttgacctggccttggaatcaacgtgtaccagtgaaaacctcccctggccgcgtcataggtttcggatagaatttgatatgaggcgcatatgtgattcgcctcctattaatatctgatactcgtctcgctaccatattctgtggccgaatacagtacaagtagggcaagtatattgtgagccttggaatcctcgatccacaaaccgtggtcgggccgaaccatctgtttgcagtgtaacagggattattgcttgaacaacccatttttattagaatgcataaatccaagcgtctaaaaagcagcctatcggaccgacgcattggatgagaaccccaataataatacacagtcaaaaaaaaaaaaaggaagtaagaatacctaagaaaaaccaaaatctcagttcacaatggaaaaaaggcaaaatggtcccgatttggaaatcgtaacgtacaatacggcggtagactcggctcacccccgacgaccccaaaacagccacttccacgattgccacctctctgacgaccttcttttttattttatttcttcttttccctcggccacggttcagaccgctagatctgtcaaagaaccaaaaagagcaactccagacggtccacccaaatccaggaaccgccaaaaaacccatgggatccaaatcctccaacccgacggttcaaaggttctgggattcgtcataacgtacgccgtacgccgatcccggttcctggggggccttcctttttactctcagcccctgacagtgacgatcgggactgcgtgcaatcagcccggacgggagcgggcttgggtggacaagaggggcctgtactccgtacaagggtcaccccaacacgttttcttcttatgtattcttactttccgcattcttgtcccggttcttgtggttggaggcgctttgagtttttcgttttttctttccttctgtcgattccaaggtttttgacttttgagcaaattatgtactcgtgactatgtattcgttctagattagaaaatatgacaaggaaactgcgcttactattggacgctatatgtctttgactcttatggccgacacgggagtatacaagtgggaccccctattgttatagtaggctcctcgtgttaggggggtgtgggctgtgccccccccttcatctggagtcagattaagcatatctttgttccaacccttttttttgtttttctccgtggcatccatgttcagtgtccaccaccgccggtggggtctcaggggtgggtggtggagcttacaggattctccccggggatcccagcgcagggcacgttgtacaaggtacttggccgtgggggaaggtggttgctgggtttcccgtactttcgggattgggttaggtttcaaatatataacctcgtgtccgggcttgctctgggggtctatgcattgattggcttggtcggtgctttctcatagggcaagtggtgtagattatcccgtcatagagaggtactgtgtacaaagtgtattcgagagatcagcaatttgcatggttattctgcagcgtatattttctgcatgcttggccttgaatacgaaggactattatctatggtgggatatgacgtgctataggcctggactaaccctaatgcagctgtatcgttatatcatgagtgccgttattctgcaacccctcggttaaatcgtatacatagacgatataaaatctgcagtcgctctcatccccagaatgtcatatggatgtcatatagtcaaccttatccagacatttggaactggtggagcagtgagtttgctccatttgctccgtcacatagtctaactcacgccaggaggggcactggggctccatatcattctgtcggatcgatccatatttatggagccagatctatgttattgtttctgacatgcaggtggcgaatgcagacattcttgacggtggattcatctagggccatcactactgtttacagatagaagtctctgcacgaagacggagatattttccccttccgtacattgggtcgagagttctgctctttggttggtggtagtagtaccgtctgctcgtactagaagattgaacatatcaaacaagacgcaccgaaaaatactttggaaatgtaatgacgtgccccacgaggctataatattaagttatgtaccaacatatatcaaatcttatctcaaactaatacattgactgctccacaaaccggagatctagataggtttatctgcatcatccgtcttggaaaatgcagctgcctcagtctctcgagactcaggctcaatgccctcgctaacgtacggctcctgctgaatcgcatggatagcatgctcgacattgactacaggacccgtgaaccagcgatgggcatcaacaaaccaccaaatcgtaaccgccagcatcggcgcaccccaaacaagacaagtccagttcatcatatcaggcgtcaggtctttgccagtaacactaggcaaacacaagatcgggaccatcaaaagcacaaacaaaacaccaacgccaccgatatacgggccaaagggacccagatgccaggggccccgacggaaccgattaccgacaaagaacacgcgaatcgtgatgggaatggcgaaagcaaagaactgcgcaatagcaccaatggagaacaaagccccaatcgccacgtctccagccagaataagaagacacatcaagatgccgaggacggcattcagcacgaccgcattgaccggcgtctgcgtaaccggatgcacctgcttccagtaattcgagaacgggaagcagtcgtcacgggcataggcatacgtaacccgcgacgcggcaaccatacacccctggcccatggagaacccacagataatcgtcaaggccaggatagccatcgccgtcttctgcggcatgacctgcagcagatacgacgcccagggctgtcccaggtcggaatccataacggcctcgatgtccagcaccgtgtatgcaaccaccagctgtaggaaccagcccatcagcccgcccacgccggaggtgagcacgatcgcgcgcggcgaggcgatgttcgcgttcgagcactcctcgctcaggtggaatggcgagtcgtagcccgacatcgtccagatcacgccgacaaaggtcatgaggacggcgactccgtctgggaagtcggttaggttggttatgtcgccccagacttgtttggagggtgtgaatttcgggctgttttttgtgccggcggggatcatgatgatgactgcgaccagggcgatgaaattgaatgtcgagccccatgagttgaactgcgctacgtgcttcgtggacatgctgctgatgccggcgtgcaggatcattatgagggtcgtcagcaggaagttgtgccaatttgtcggggtgtattctgggttgttgatcgaagctgctgcgaggatcattgcgctcagcgagtagttgaccgatggcgctgcggtgatctgtccgatccagttggaccagccggtgatccaggcggcgaagggtccgtagcccggaggtgcgaggactgctgcggcgtagtatagtccgccgctgtatagacgttagccttctgaaccctaactttccttggatgtgatatcgagcagtgtatcatacctagtcggcattgccgaacatagctctgccatcgacattgctatgcactggataaatatcatcgcaatgatccaaccccagaccatacccgctgttccggcatatcccattcctttaatccagtgtcagctataccttgaacccaatcttcaaagcgcagatctgtgagtactcaccataccacagggtactcgcaaatgacggtagcaaccccagaacagcaaagctgacgcagaaagtcgtccatagcgagaactcgcgcttgaactcttgcttgtaaccaagcgccatgatcaccctctcatcggcatccatctcatgatccgtgtatggcacatcgccatccgggagaatggaagtgacttgatctttgttgacctcatgatgtcctttggatatgtccgacgaggcagtggccgttttggtctccatgtttgcgcccatgaccaatataaataggtatggcgctcttaatgtgtgcgatatatatatcaacgaaataaaatgacaaccatacaggggggaaacaggaatgtcttcactttaaaccacagccgagggaagtcggagcataataaaatagcacagactaatggtttttgagcaagtcgacaggggtcagccatgttatctatagcacggagcattttgcgtttcgccccgcatcaagacatgggaagcagctctctacgcaatagtacaccttacaacgaggtgagataagagtcaatgacatatggattgatgtggataaattaaaaaagatagaatgaactgcacaataaagaggtattttattcgaacacgcgatggcctcactgtgcaggcttgtgatttgtagggacgggagataccaccgctgattcgaggcacagggctttgacgatcggtgctacgagcttggtagagagaagtctagtcccagcaaggaagttccaggcgttatacttcacgggacttctgccgtgagacagcgttagcgcatcagatctgcttatcaacctaatgacagagataagggcttgactcgccaggcgtccacgggtgtcggctgtgctgattggggatctgttcggcgttctgaaacctccaggactgccattataatttgaggcttgttatctaaggttggacttaccttgttggggaaaaagggctatgcattgaatgccggagaacccttgtttgtggtatgtatatgtcatgaatacatgcatatctacctagtcccaacgacagcgctatctatagtaagctcggaaactattccatggaacattcggatgtccgacgtatatactccgtgagagtccgtgttcccgagagctctaggtttttcagccctatgaaggtgaccatatttactttgaaacaacggtttctatgtggtattaaaaacaaaatactttcatcgctattctacacagtacagccccggcctgtccctcaaaagctctgattcatatctatcgaaggagagacaggtatataccctcgcgaatgattcagaaggcctaagaaagtcagcatcatatccaaccctccaaatcaaccgtaattgactcacattgtcctcaggggcgatggtgcggtcgtagtagttatcgaggaaaggaagcttgcggagaatgtcgttgcgcacacggggaacctcgccgaagatgaagagggcaccggaaccaagggcgacaccgaagccagcagcgacagtaccactgttgagaacgttattagcccctgtatcctatccaaactggatagtcgaatgcgggatgtactcactactggacggctgtgccaagggtcatacccgcgacggtgcgggggatgtagtacctgcagattagtgaggcgttagcttggtgttctgcttgcttgattgatcggtcttcttcgatatccagctcttttgtcaaagcccatggtctgctccccacggatgccggacatccgtcaagctccgctgcaagaggagaaagacgggaatccaatcaacgagaaaagctgtgttggcaagtacaaggccatattttatttgctccatccaacgtgctgattgccgaccaacgtgtactgtccggggttcgaataagaagggtatgggggagtctcacttgggcgcataggcggaggcctgggcggagacctgggcggcggcgcgacgagcagtaggggcgaactagaggatatatgttagcaattgacgtgacattttctatctcgttttatcccgcggctcggaagccggttgtgatactcatggccttgtcctttagccggagcgcgaccaagtaggcaaggaaccccggaatagaatacggggatttctcatccatcgggtatgaaagcacttaccattttagaatacaccggagtgatttggtgggacaattgctaggagacaagagctggcacttggtggtcgacgaaaaccgggagtgcccgagtttacacgtgactccaaagccagtggccaatcagaggaggcgtaattgttttcgctcaagtatgaggccgagtcaatggattagttttattaaggagagtccaaattttagtcttacatcctgttttttatgctcaggatggaaaatatactaccacaccagatatagatggcaaaagaagtggcacctgacgtaaaaagaacaaattgtagatattaatgcgttaattgacttagcactaggaagccttgcggctcccaagaagctaatacgcctaggccccaaaaattcgcgtgatagctgaaataaatggaataaaaagatatgtgcttcaaaaccccttgatctgacatgcaagggattcaactaagacaggattgatcgaacaggcgcacgaaaggaaagcagcaatcaaatacagtggaaacaaaagattataagaaccacgtagccaaacaccctaactgtacatttgtctcattagtcgactttgtcggtcgagcctccattcaggaacccctctttgccatccaggtggaagaagccaccgttgttggtggcggtgttgccaataataccgccgcgagcagcactacgtctcagacgtccacgtccgaatatggtagccacagcaaccacggcacccaagatgatgaagaagaggatgggatgactgccgaggagggatcgagcaaagaaaaagatactctcaaaagtgccgatggtagatttgggtgacaacttcgaaggggaagcgatgacgagaggaatagtctcgagaatagaggtccgtgaggccataataggagctccacttgaagcagtatcccagtagcggcggttctataggaagtcaggtatagtgcttaaacaaatctcacgagggaagacttacatcttgatcattgataataacgcggtcactggtttccacatcgataccgtaggttgtgcgcaaccagcgttcccaaaagtcgccgtcgacccaagcaaatgcgacttgcttcttatcgtcctcgcggatcgtaatacgcatgtttttcgcagcccgtagtgcacgctgatcattgcggtcgtcggcttcttcgatgcgcagttgcttggaatcacgaagttcagcccgctcaaggcggaagagttgaacctgcttgtccatccattcaagagcggcttccttcagttcgcgcttggattgcttaaagtcatcgcttcggcggcggctgaggagtccgagaaccacgaactttccgtccatgatttcttgggcgttggatgcggtgagctcaggtacgatgggcagccacacagtctgcatccacgacaagatttgacggaaatctctcatgtccttaggagcaagggcattatagtagttgggacgtccgtcacggacgactagaagacgaggccaggtagagatcttgaaccgctcggaaagaggagcactgtcagacttgacaatgcgagcgtgtcccacaagactaagggtgaggcggttcatggcctcgaaatcttcagatgtggtcgcgtggtcgtagagatacaggaacagaacctcttcggtttcttccaacttcttaaaagtagtcgaatcaacatcctgaatgctcgagcccacaccgacggctttgttggtgtatgcgatcagatcacccaagccacgaagaccggtatattcaactctctcgccgccacggaagaagtagatcgtcgggtaggcattcacgcgagcatcttcgcacagtcgcttctcaagatcgcagttcacttcgccaacattgagagtatccttcatctccttggccatcgagttccagttcggggccagagcttggcaatgatggcaccaaggaacgtaaaacttgatgatccatggatcgtgggtagtcgtaacaagactttggaaactctccgcagtgagtgggatagaaacgccctgggggttagcaggccgtccttggagcttggccttgacagactcagcgctaacgccttccaattccgcggtctcgatgctctgcttctcgacagctgttttagcgccaggctttaccactgcaggtttagcggtcatttccatgctctcagcgccggcctttgggatttggatgccttgcgaaggtcgggtcccaggcttgattgtctcgagtttggcttcaatcatagcggcaatatctgacatcgtcttggcacgcgcggggggttcgttctgaacgcccatatcatagaacgcccacgcggggtaaaattcgacgttcagcttcttgcagaaatcgccgaaggcctggcagtttatggacccgaaatggagattatagtagccagtgaatgagtccagagacgcgagctcatcgggtttcaatccggagaggaataaaggatttgatgtctatcactaatcagatccaaggctcaaatgttgaaataaggggatagattctcacgtagtagtactcatacagggtctggtacaatggggcggcgatccggcaatgcgggcaagagggggaataatgtttgatcatcctagaatagttagagccttgagcggtttattgattgctgcagaagggattctcaccagtaaccatctttggtcacttcctcgaaattctccggggtcagctcggtcaacgggggcacttcaataccattgaatattgtgggtttgtcggtatccactccacgagacgcccttttgacaagtgtatttccagattgttggtcggaagcatctgaaggcgtacccaaagcaggcgctaccaacagtgagaggagggaccaccccagccaagacggtttcattttggtaaaagaaaaaggcgaataacttggatagcagtttaaaggagagtataagtagtttcaagatgtcaaagctgagcaaaacgaaggactctggtcgaagtagggaggataatcgcgaaatgttacaggtggcacattggacgggggcgaagactggcgactcgggtgggcactggtcacgtcgcagaaagaagcagcacttagcgactatagcgcccgtagctgagagcaaaatagaactgcacacagtccaaacaaagaaccagatgtgaggctttgatggtattcggcaaaggtaagttgttgcgtttccccctgccgtttcactatggaacataaagttaatccgctccgggccgacttcaccacttcatctccctggaacagagcgacttcaatatcaccaaatccattcacaatgcgctccacactccggctactggccaatgtcaagccccggtatttggagccttttgctcctaccggattgacgggccttttcacccaccccagccctcgccctactttaatctacctttactcgactactctgcagaagttgcaggcgttccccgaatcctccgcctaccgccaatccgttgaggctttgacccgacaccgcctccaagtcattgagtcgcaaaagcccgccggattcgatgcatggttggagcgtgtgcggaaaaccgtggcagccgaacctgagcggtttgctaaggtccagcactccgacggcacctacacccatgccgctgcccaacagaaggatggatccgacaatgctcgcggtgaagaatgggatggcgaagccctctcagctacaaccgagggtcccgcccgtaccccgcaacaagaaggagaatggcttgaaatcatgaatgaggctagcgagaccaccgacaaggccgatcatgacttccaccacgaacatatcaaatgggagagcgagcctgcgcttgatgtcgaccagtatgtgtacctagctttccgaattgacctcgaacaatcgcgaatctaacgctaatctattgcgcaggatctctcacatcgaacagcagatcggcgccggccttattgaggagatcatccaggtcgcagagacagagctcaagcttgtggatcagttggccgaggccaaggtgtaagtggaaatttgaagattgtggtttagacttcttgctgacacttttacaggtgggaggaacttgaggaaaagccccaacccggccagtggtcctacttcgagcgtggtcactaaacagcaaatctggaatggctatgaattttaatctctgtaactactactagaggtctctttgtttgaatacatgttttgagagttcaaacatttgaaattttagagtgagtcgtagagctaccaagctatgattcgcatattcgacgaatgaaggtataccagcaatttctatcggacatgttgatctaattgagacatgtctatagcctagtatataggcaattggtctttcagtttcaattttatacatctgggtgatgattatgtacagcgaagtatatcgaaagtatttgagctattgctattttgtccagatccatacttggaatataagcttacatttcaccaatctcacatagcaatccgtatagctttcttcaatgcaaatgaatttgtaggacatttgtatagcggatagaccgactagaaggcggtgagccaaggcgggaatcccttgtggacacatacattgctgtccctgaatgaagcgcactccctcaagctctccttcatctcaatcctttcttaattcctccaattaataacttgccccgaggatcgctcctccctatcattgggctgtttgagcggctcgcgaaatctcctatcgctgtcacaggcccaacaccgcatcacacaaacactcgtctcatcccccacacaacatgcggctcgacatcaaggtacgcacgataaaacgtttcatatagttgcaaatctgctcttagcacatacagtgatatgatttcgcaggtgaacgtccacaattggagggattgctgacgataaatgttacagaggcagctgtttgcccgctccgagcgggtaaaggggattgatttccaccctacagagccgtgggtaagctttttcaattcactcagtagcttcgctcaaactaatttgattcttagatcttgacgaccttgtatagtggtatgttgagggaggggcagtatgcgagacgtacaatgcgctaattactttcctgtataggccatgtctacatctggtcttatgaatcgcaggtaaggcctgacacagatttacactccctatactctcgtctaacatgtctaccctgtagtctatcatcaaaaccttcgaactcaccgatgtccccgtccgtgccggtcgatttattgcgcggaagaactggattgtctgcggttcagatgacttccagctccgggtctacaactacaacacatccgaaaaaatcacctcctttgaagcacacccggattatatccgttctattgccgttcatcctacccagccgtttgtgctcacagcctccgatgacatgacaattaagctttgggactgggagaagggttggaaatgcgtgcaagtgttcgagggccacagccactatgttatgggcatggcaatcaacccaaaggataccaacactttcgcctccgcatgtttggaccggaccgtgaagatctggaacctcggctctccccatgccaacttcacactcgaggctcacgagacaaaaggtgtgaaccatgtcgactactatccacaggctgataagccatacctcctcaccacctccgacgacaagaccgttaagatttgggactacaccacgaaggcactcattgcaaccctcgaaggccacacaagcaatgtctcgtttgcttgctatcaccccgaactccctgtgataatctcaggttccgaagatggaaccattaagatttggcatgcaaatacctaccgactggagcagtcattaagctatggcctagaacgagcatggtgtgtttcctaccagcggggtagacagggaattgcgatgggtttcgacgatggtgctgtcgtggtgaagatgggtcgggaagagcccgccgtctcaatggatgggtccggtaagcttatctgggcaagacacagtgaggtcgtgtcgtcagtgatcaagggtggcgatgctagtgtcaaagacggcgaacccctttctctaccaacaaaggatttgggacagtgcgaggtgtacccgcaaaccctgtcgcactctcccaacggacgttttgtttctgtctgtggtgatggagaatacatcatctacaccgcattggcatggagaaacaaggcctttgggcaagctctcgattttgcctggggtgcgaaagacaacagtaacgattacgctatccgcgagtcatcgacaagtgtgaagattttcaagaacttcaaggagcagagcgccggccttgatgttgggttccaagccgagggcctctctgatggtgtccttctgggtgtgaagggtcagggtggcattggcttctttgactgggagactggcagcctggttcggcgaattgaagctgacccaaaatccgtaagtttgctctaccttgatatttggaaattatgctaatggacacgtacaggtctactggtccgaatctggtgaattggttaccctcgcctgtgaagatgatttctacgttctccgctattctcgcgaggattatatcaacggtctgaacgccggtgaagccgacgaggatggagttgaggcggctgttgagttggttgctacaattaacgagaccgtccgaactggacagtgggttggagattgcttcatctacaccaactccacgaaccgcctgaactaccttgtcggtgaccagacctacacaatctctcacttcgaccaaccgatgtatattcttggctacctgcccagggatggccgtatttaccttgccgacaaggacgtcaacgccgtctcctttagcctttcgctcagtatgcttgaatatcaaacagtggtgctacgcggtgatatggaaatggcatctgagctcctcaaggatgtgccccaagaccagatgaacaaggtcgcccgcttccttgaaggccaaggatataaggaaatggccctggaagtcgctacggaccccgagcaccgcttcgagctcgcccttgcgttgaacgatcttgaaaccgcactcacgattgcccgcgaggccaatgttgagcacaagtggaagattgtcggtgatgctgccctggccggctggaatcttgctcttgcccaagaatgcttcaccaatgccaaggatgtcggttctttgctgctgttgcacaccgctagcaacaaccgcgaaggactcaaggccctggccgctcaggcctcggagtcaggcctccacaatgtcgccttctctactttgtggtctctgggcgatattgatggctgcatcgctctcctcatccaaaccaaccgcatcgctgaggcagtccttctcgcccagacctacaagccttcaagcgcccctaaactcgttgtccaatggaaggagtccctagagaaatctggcaagacaaaggttgcccgccttatcggtgtcccgcccggtgcccccgatgtcgcctctaccgatgacgatctcttccctgagtgggatgagtacattcgcctagagaaagagggtaatgtccccgagcccccttcctcagagtccttgattgatatcaacggcgatgaagaagaagaagaggcagaagcagagcccgtgagtgcgaccaatggtgcactcgaagcggatgaggaggtagagaaagccgacaaggctgcagtagatgaggccgatgctgccgaagccgagtgaacgaacaaaaagcaccgggttctgtttggtgacttttcaggagagttaggttgatcgtttgttttctggctgaccagtcagttcattcttgattgcgagcggcgtcttaacgtgtgtccgactttttttactctctcttatttgtaattgcgctgtcatgagtctctggagcaaattacatgcctagatacaagcaacatgtttccctttatttctagtcatttcttggttgttttattagatcattgtacatgtactaggtactaaaccggattctccttggtgcttgggcttgtatgagctcatactctgtgaacgttactgaaggcttctagtgtctagtagtaaaaaagacatgcctgaatgggccactgtctacctgctgccctgcggtgcagttgctgtattctggtcataaaatagaatacaccacgcacttcgcaactgaaaccgcccagggacgtgatccatcctactcggagactaaatatgatgcagaactgtttgggcattgtccatttgagagttttatcgagaatacaggacaagggtgcagacgatgaccgcttgagaaaagcaacgaaaccaagggtaagaaaggaacctgcctagagagaatgaacacttgagatggaagggagatgaccgaacaagacaggaaaatcaaatcaaagcgctcaacggccatatgaaacgacaagaaacaatgtcgtctcgaagatcaggagcgcctccgatatcaagatgccacagactccgttgtgatggaaaaaagaacaatatgatggacagagcgaaaaaagggaaaaagaaaagatcaagattggtcgatatgttaatgaaagacatatgcgcagttagaaaaggaaatggtctctatgaacctcttgtctctttctcgcagcaggaattctcgatctaatttgacgcggcgagaatctctactccgcaatgctaccgaaggacgggtctttaacactgccgcctgcatcgccgaggccagccacgggtcggttgtatgaccatccggcaaactgttgctgcatggtttgcgacaggacggggccatcgacatatgagtcctggggcgcctccctggtgaattcaacatcaaagttctcagtatcacgggcatccacctgcattaagttagccacatgttggtccattgcatgatcaggagtgaagaatacataccacgtttggtcggaagctgggttcatacttcctctgcagaagcttacgccagtcgatgttggcaaagaagtggtgagacttgatctccgcagcaccgttggcacccagtcggcgcacagggtcacggtccaacagtcgactgagaagatcccgcgcagcaggcgggacgatgtcgctgctggggaaggtcaaaggctcttgcaagatcttacgatacatttcgttggtgttttcatcatagaatggaggcaggcctgtcaacatctcgtagagcaaaacaccgagagtccaccaatccacagtcttggtgtagccgttgccaaggagaagttctggagccagatattcaggggttccacagaacgctaagtttggttagatatgtagggcgtatcatgagtggtgagatcttactattggttcggtcttcatctttcatgtctagcttgcagagaccgaaatcgcaaagagcgatatgcccggtgtaatcgagaagaatgttctcaggcttgagatctcggtagatgactttgaagccgtggagacactcgagagcgcacagcaactctgcggtgtagaaacgggctcggttgatatcaaatcgttgctccctttgcaaatggtggaacaactctccgccgttcacaaatgctaacacgaagtacagcttctcaggcgactggaatgaaaacttcagcggaacaataaacgggttgttaatttgtgcaagaaccgatcgctcggcgagtgtgtgtgtgacttccgatcgcgagataatgtgagccttgcgaattgtcttgagggcgtagatccgaccagtatccttcttcctgttaatccccgactgttagaagtttggacccatataagtagatatcgagtcaacctacatgacctgcatgacctttccgaaactacccttgcccacaaccttgagcaaatcaaagtcttctaatttaagactccgctgcttgttctccacaaaggaaataccaatcttgatcgagccaacgccaaattggagatccagccactcagtaccttgatgaccctgttgacgcccttgctcatcatgagctgcggcggccttctggttatccttcttgctgagcttcggatcctccacatatggctggctctcttcaaagcgagggttgaccttgcatgcgcccaagaagatatcctcactccgtccggcaccaggccgggcagcagggttgcgcagatacagctgtacattcaactcggtcttccgggacacatcgaacttgaaggctgtattatcaccagcccacaatgggctctctggagttcccgaaacggcatccacaaagacctgattcttctcgaaatcaaggagggcatacggaaggtatttggtggaatagcgaccgtggatagtgggggcggcattgattcccccacttgtggactggggtcggccagatggcacaaaggaacccgcttggttctgagatgaatgtgacgaagaagaggtacttgggcgcagagaagaggacgcgtaagagttattttggaaatgcgagttgaagatctgttggaagtgaggtgacaacgaaaaattgcgcccttcgtggagagtgacgataaggattcctgggttcacaggggccacaggaggagatacaagagactcggaagccgctatcagaacgatggactgattagttactgggggggaattctagtaataagaacaacataccgatcccgttcgttgatggggtggcggagggcgggttagaggcgacaggtgtcagagcctcatcaccatttgagtcacccttgatcgtcgaagtagacgacgaccggccaaatgatgaggtcaagggcgccagatgcgtctccttcaactcttcagacgagttggatcattagcgactgcctctggtccactgcagtgcagagaggggtattgaggggggagagagggagaccaactgccagtaaacatacttttagtgagcttccaggacatagtggcggttgttgtaaacagatcgaaaagaagagatcaaagtccaaggtaccgcaatgcgtgtgcagggtgctaagaatcacacccaataatcaacacgcaaatgccccccaaaataaacctggagagccacacaaggacacagatgataccacgcaaaaggaaaggagtcaagacagagacaaccaccactatagcttttgaaatccgaatggaagcacgactaaggataagaagaagtcggggagatcgaagatcgaatgagaataagagaggggaagtcccccctgtaattataatacgaagtatactatagattacctaatattacctctttgattggttgagctggtcacacactggtcactccaaggtacagtaattaatcagcctcagccactgctccgccacaagggttaacgacgcatcaccttccacgacttgaacaatcaaggcagttgactccacagaacgaggaagtttgagatccagcttggatttgtattggtatcattttgcctactctcccaagttccggaatattccccgctccgaagtgcggagacaccttccccggaatatctaacctcaactttcacctgcaactccagtactctcagactcctgactctgtttctctcgataccgcaccggacaaatcctaggatgaaagggatggaaagataatgggtgtgatacgcaagaagaccgcctcgcgcggcaccgaggccggcaccaagttccactgcgatgtgtgctccattgatgttacgtcaacagtaagtcttcatgtctgtcatggccatttaaaggtctgttgttttgttcagagactaatgcgattccatcgcataggttcgcatctcgtgctcgcatcccgcctgccccgaatatgacctctgtgttccctgtttctcagccggaaagaattccaagaaccatgaccccgccacacatccattccaagtgatcgaacagaactcagtccccatattccaggcagattggggtgccgacgaagaactgttattgctggaaggcgccgaaatctatgggctgggttcctgggcagacatcgcagaccacattggcggctaccggagcaaggatgaagtgcgagaccactactacaatacatatgtgaagagcgtcaactttccgctcgcagcccgtgccgatccagacgatagggccttgcaggattcgatctccaaagaggattttcaaacacgcaagaagcgtcgcatcgaagagcgcaaagatgcagccaagacagcacctccaaccacaccaaagcagaagccgactgccagtgtaccggcgtgtcacgaagtgcagggctacatgccgggacgattggagttcgagaccgagttcttgaacgatgccgaagaagcggtgcagcacatgacttttgagcctggggctggattcaatgaaaatggcgagccagacgcagagaccgagctcaagatgaccgtggttgacatctacaactcccgcctgacagcgcgaacagagcgcaagaaaatcctcttcgagcacaacctcctcgactaccgaaagaacaccgccttagataagaaacggtccaaggaagagcgagatttgttgaacaaagcaaagccactagcacggatgatgaactgcaaggactttgaagacgtcaacaagggcttagagtacgagcacaacctccgcctagccatctcccagcttcaagaatggcgccagatgggcatcggtgacctaaaggcaggcgagaagtacgagcaggataagcaacagcgcgttcaacgactgcttcctcaaggatcatttgaccgttttgccagcacccgccctaagcagtcacagctgacagagacacccgcggcagcgattcagcttacaacacctgaactgcctctgcgactgcaaaaagcggccaatccacacgcaccagcggactccaccgaagaaacactgaacgatttcgatcgcgccttcgctgtcgatggggatgcgcctcccccgcagccggcaaagacgaaatatgtggtgcctccattaagcgggatgccgtcgtggaagctggacaatgagactgctgccgatctgcatctcctgaccaaggaagaggcagaagtatgcaatgttctacgcctgatgcctaagccatatctggtcatcaaggagacactgttgaaggaagcaatgaagcagggcggcaacctgaagaagaaagatgcacggatgatttgcaaggtatgtttctcactcgactcttgcatgcggactcttactgattctgttagattgagggcaccaaaactagccgcatttatgatttcatggtacacagtggttggatcaacaaggcgtaggtgcgccagatccatcatacgctgtaattgcttctgagcttattgatatccaaatctatttgtgatttcgttcgggggcgtttttttttcggcgttcataaggaacttgggaggtgggcggatgtattgatctcatacggcacaggcaggttgatttatcacctgcaattcgtacaattgtacaatgcatagtaacatacagctatcgtctagtgtaaagcaacaaggccatagaacacttctaaagccatccttgatagagacgtagtaaactatcccccacactcctcggtcctcggttctccgcatctgcaaactacccccaacttctgtcgatcacctctagtttcctatatcatttccttaattaactcttctttctcccctctcctcaataaaaaatcaatctctcctagaaataccaagaaatcaaaatgccatccttcacaatccagcccccgaccccagcccacgcaaccctcacctacccagcaccccacatcctcctggttacgctaaaccgaccccgcgatctgaactgcataaacgcgcaaggccacgcagacctccacgccgtctgggaatggctcgacgaagagccgagcatgcgcgtgggcatcttaacgggaaaaggacgagcgttttgcgccggcgctgatctaaaaggtgagcgcagccatgtctacatacatacaacagcaaatatcacaacaaccgcaatctcacaatcccctaatgccctaatcccctctccaatcccttctaacaaaccgctaactcaatccagaatggaacaaccgcacctcatcagcagcaacaacctcaagttccacaacgccaatgccaaacagcgggttcggcggactagcacgacgcaagggcaagaagcccgtgatctgcgccgtgaacggactctgtctcggcggcggcacggagatgatcatcaacagcgatatcgtggttgcgtcatcgcgggcggtatttgcgttgccggaggtgaagcgtggggttgttgcgcttgctggggcgttgccgcgacttgtgcggacggtgggcaagcagcgggctatggagatggttcttacggggcggacggttggggctgtggaggctgagaggtggggacttgttaattctgttattgggattggtgagggggatggggacgaggagattggtcgggctgttttggggaaggctttgggggttgctgggcagattgcggggaatagtcctgattcggtgcttgttagtcgtgagggagttaagttggggtgggagggtattggggcggatgaggctacagcgatgttgaatgatacttgggttaagaggttatatgagggggagaatatcaaggaggggcttagggcttttgtggagaagagaaagcccgtctgggtggatagtaagttgtgagattacttttttaagagaaggatggcaaaggatattgattttccattcgctattcatagttcagttcagtcagttcagtcagttcgtaaagtcatataaaacactgatcccattactcccgcgccgtatacctggtattcgcgatattccatgcaagttgaatttcagtcaaagcgaaatcaaatgcgcggttgccctgcctctcttctgaaatagtgatgttaggatgttgtgagaaggcgcaagaaagaggtgcctactttgcgtcagattgtacgcggtccacgaccttgaccacgtgggggaagagagggtggtctcgttccaagccggtcaattgggcagcagcgtcggcaggcgagttctccttgaggaccttggccaattccacactctcctcgtcaccttccacattctggaaccgcatagccatctcaagagagcccatcagtgcgtcaaactttccgccacgctcagccagctgggcagccgggccgatgaaacgctccttgcgggacagtttgcgcattggggcacggcccactcgctcgaccgtgtcctcaaggtagtggttggaaattcgggtgatgatggtctcgacgtactcctgctgctcggcggcgctgatctcatgtttgtcgatgatgagggaggcagtctcttgaagcacgttacggacaatgccgcggatgcgagggtccttgagggcttcggcaatggtcttcttgccggcattgtagccatagtaggccgcagtggcgtggccggtgttgacggtgaacaacttgcgctcaatgtagggctccaggtgaccgacccagtgaatagctgggatgtctgggtgaccaaactcgccgaaaggagtggactccacggcccattcatagaacttctcgatgcgtacattgagaccgctgtgggcgggctggccaggtacaatacggtcaatggccgagttagcaaaccgggctcggtctggcatagagccaacacggtctcgggcggtgttgtctttgatgaactggtgtagagtgtcagtggcaccgatagcgttctcacaggcaatgacggccaacggtgtggtggcggtgcgggcgtcgatacccttggcaatgacgggagcgataaacttgaggatgttcggacccacggcacaggttacaacactggcggttgagatctccttgatgacatcgctctcatgggtcttggagttgattgcacggtagttggtgatggtcttggtagactcgccctcatcactgacctcagtgacctcgtaggacttggtgttttgtagagcagtgatgatgccgtccatgacatcgacgaagacgacctcaaagccagccgtgtggaggaactcggccacgaagccacggccgatgttaccaccaccgaagtgaacagccttcttctccatgtttaagttgaagagatgtgggagtataagtgggaattgaattggaagtagaagtagaggctatagtagagtagagtagagagagaagtagaagtgggaggagaagtagagtagagtggttaagactaaagaggaagtcgtgtaagttgcagtttctccaggggaaagtgcagctatttaaggaaagagggggaaagtagggcagaaactatgaaaaggcctaggactatgctcgtcccttggaaatctcacgatgacttcatagatagctcggcgacgggactaacctccgccctgtttaatgaggacatgatgaatatttcccatccctgtattattgctcgattatttacttgtaattctcgatttcgctccaatattctaaacaaagaggattattgacccgagagatgttacattccttcttcttcctccccccgctttcatgtctgtgcaactccaaccaccaccgagggcatacagacaatacactattcccatttgagcaacttataggtttcgtttcatgcgcacgcttgaaccattcaccggcaaaagaaaagaaagcaccgggaaaacccgcccatattggtcaatacttcgcgctttgacgagaatcttggcgactacagtcggaaaatcagccgggaaaagtccaacggagtacagtggtcctaggcgtctgagccattatatggaaactgggtatattggtttgaggtataatacatggttactccaaggaaaattcgagactcttcacgatattcaatagaacctcaactgatatccacatgcggtgacgtcggatgaacggttgacccagttttttccccattaagtagcggccaactccatcaagccgaggtctttattcgaagtacgtctatcgccttccacgcgctctcgctctagccccgatggactatcagatcactgcctggtttgcactgcccaacatgcctgagcccctggaagttagggggaaaaaagcctcaccctcgaggtccctccgggcccgaccattggcccctcagatatcgcaagccggatgggcaattttgcaatttcgctcgaaactagttagattggccactgttctctattggttacgcgggaagaatctgatgggtgatatcattcgattcataaatggctctctatctactataggacggattatatgcgattctgcgagtttccccgatctccgctcccccatctgtaacctgcgctctccgactggctaagaccaccgctccctgtgctgattacccctctatatcttttgagacggccgcaggcgcatatccagcccgtttgttaacatacacattcacaaagcaagcaacgctaccggcgagtaacagccccaccgcggcccaagtcatcccaaggaatttctcgccataatgggctgtcacgttcgagcccctgccgtgggcattaattagagcgacgaattcaaaggcgatgaccgttgcgattatggatgcgacgctgacggtaaaagacccgacctaattttatgatatcatggtcagccatttgcatttgccgtgttctggggaaatccgaactccgaactggaaaatggaaatgcaccacgctgaactgggaagtacactccagtactgcctgcataaacgacctgcacaggcagagtttatgtagggggctaactcgatcaccagatcgtgttcgtgtatatgtcactaactcaccatgaaaaaccaaaattcaagcgggccctggcatgcgcgcggagcgagagtcgtccatactcgtacaagcatcgcagcgcccatcgcgccaatgccgatacagtacatcaccgccatgacttggcatgtcattctgaacgcgtggaagtcgtcgctgatcacgcgctgccacctcatatccggactggaggtgagctccttcggccaggcttgtgtcgggtcaaatgaggatgaaatcgcgcggttcgagcattcggtcacgttgcgcgtgacttctgtgcctgggtcgatggtcaccagtgttccctggcagtaggacatgacgtggacggaatataaatcgcgcactccactgccggtgctgtctggtgtgtagagctaaatggataaagggggtcgagtcagtcttctgactctacctgccacttctagagagtatttggagacggtcggacttaccgttaagatatccacatcgtcgaggaagttcctctgcgtccctgagaagagacataggagggtgagtataaacgcgacgaacactgccaccgtctggaataggcccttgaagtccgacatgacggcggatcgggtgtatgcgttggtctggttctggtggtctgcaagatgtagttggatccggtatgcagcctctggggatgaccacaacagatgatgcggaggctcgatattcaatgagaagacagacacccgaatctgcgattctcgcccggttcgcgatccttatatacataccataatggaagcgggatagccggcacgatcggggtcaagatttctcacgatcgcttcattccagacgtgggctgttagaaagggcggggacacatatattcttcatagtagtatcgagagttaattcttcgtggaatgtatgcattgcccgtaattgcatacagagcaaaagccatacggagcgaaagcctacagctattcgaaatgtaagtctggagtagccaggtatgatggctgggaaggggatgagcgtggtcttgtgctcttcaggaatgttgggaatgttaccagccacgaaggatcttgcatgtcgatatcgtacttgtgttttattagtgggatctggcattgatgaattagtttagataatattagatatgacttgagcatgaattgtatctatgggctggttgggaatatttcaatcttagagatgaggggatgtgccagggctatatattagaccccaagagaccccaagagaccccaagacatttgacgtcagcgacaagggtttcgtacttattgccttggccatagacctttttgcacatgtttttgcgctaatctccagattggttcagcatcctagaaattctcggcacaaaaacctcaattctgagtcagtcgggatttcagcccagatcgaaatttacccgatcaagccatttgccttgtttgagtggaaaacaactaattattatggcaaatgttgaagaaataaggaaatactcgtctcccaatacgatttgacttacttatgttcctgtacggcgtgttatcatcgaacaaggggaagtgtagtccctggcggagacttgttgagtataaacatttatggatcgctatctctagtttatttcgattgcatgtttactgctgaccttgtcaatttgcgatcaaaaggatcactgcatgaatttgatcaactatgttcttcagtctgttcttctcgctttcccttttcttcgttcgccttttcctcctggctcttcgattgttggtggaaagccaatgtatatgcatccgggtcccacgataagactctggtattcatctcttgcagcttgcgatctaaaagtagttccatctcatccttttgtccctcatccaacagatcaaggcgttccttccaggcgtcctcgatactttcggtaggtccaaaaaatcgcgagtcgatcttctgccaatatataccatcaaaagcaaagctgtgcaacgctgcgtacagaatccagaagtctccactctcccagctgtcattcataggaccggagagttgctgatcttctcgcaatcgaccctgttggattgctatatcttcacaattcttcatcgctctgaggaagatctttagacgacatcgaacgacctcgtccagtcatcgaggccctttggccagtcctcaggcttctcaatgagcagccaccaaggtggcgcataagagaattcagtgggtgctgcgtacgtgaactcccagtccaccacgccggcaatatgcatattctccttgaatagtacattagcgggccttaaatcatcacaccaaagtttgaaaggctctttttcgagtaacgggtttgtaggtttcttatccctaacgagcttgcgaaagagctgccgcgccacaaatttccgccgacagtcgtctgcagactgcaccgagtcatttctctaatgaactaaatgattgatgttgagttctgcaagcgcttcgatatatgacgaagatgtgtcgaatgttgtatgtaggccgggcagtttcgaccgcggtagtccccctagtcgaacaagttcattcatattcattgataaaggccgaagtactacttcccaggtgaagtcatcggtctggctaagggatcctacgcgaggaaaagaggggatagagagttgaagcagtactcccgccagctgcccatacagcatttcaagcttatcttcgtcgatatccgggtctaggattccacgttgccctttcggacatctcggtgtgttaagagagtcgtgaattttcgactcgtggtcaatataatccataataataaatgagctgagaccgaggggactctcttccttgtacccgagtgaagaataaaaggaacaggtattgaagtttggtcggcgaggaaccgcatgacggcgacctcattcacgactttttcctcggggaaaaggacagcaccgggctgcgatagccggatcacggtggcaccatttcggtactttaaccgcaaggatatttctgagtatggcaaactcggtagcaatgcctctgttgtgagtgaggatgaaatctgcaatcggtctgaggatgtcaacttcaagaaattgaacgagccacttgtcagacgtttcctcggcttattcccaggccatatcgtcagggcacatttgagtctgcatatttgcctcttgttcaattgatgcacaataagattagtgagataaagccgagaagagggccggaacatacagggttgtgggtttttttagattttggagagacagggttattacatgactattgggggctcctagcaatcggcagagtcagactcatgcagatgcccaaggggaagacaggaactctgccaaaagccgagggaaaggacggggaaagagtttcaagccaggagctcggatttcccggcccaagataggagaacagtatccacaggtcgaagaatctcatgagaggaggaagcatatcactgccaattcataccgttctagctcttgaagagtctgctactagtagacatcttcatattcaccgtcttcatttcgttgatgtagagtggtcttctcgtttactgttcggatctgttcctaccatttcctcccacgcgatgggcaaatggcgaaggagcaacggcgaattctcattgaagcttcttcattaaatatatttttgcatttctagaaggatgcttgaaatagaaatgcgtctctgcaatgtcgcattgactcggagaccatctcatctctaaagagttattactgttacctcaatctgaaggctccgctgtgaacatcctgacgaatcaaatgcacttttcggggtaaccttgaaatctcctataatagtaagataaatctaagaattatatagaaaatgtaaagtgtacatcaaagacaccacatatattgcatactgaagttcagctcttgcttcaaacatagttacttgttggttcttttgtcattgatactagtaacggacttcatctacactcgatatatatcttgctatattcacatgtctatgacaaagtatgcattcgcaaaagggcaacgacacacgacagacattgccacattcagatgttcctgttcctatcatcacatggctatatcatcacgttaccattcacattaagcgagactatgtcgttgtttgtctcatttgtgaatagtggcataaaccgaccgcccttaggatacctataagaaggtggccctgcccccagaacttcttcttcttttctttcttcttcagctctctttgcctctggcttagatcaagtgtagtatctgttcttgccagtttaatcgctggtagttctgcattgcagaacgtcatgattattccaatatttggacctcgcgacttggcctctgtgcttgcacacgcctcgttgcactgtgtcactgggcttacactacccccggtcgacgcgaactccttttcatcaactgttcggcttgcccgggcgcttggagaagatgtgtgcttaggatgtacgtccttgccaagtggttccattttataccttgttctgtttcgtatgtatattttgtaactacccatggtagagacagtctcccaggcaacaataatgaatgtgttgagactgtttctgtcttgggttggtgagacctgctccctaccatgtttgaacaccaatacaacccatggcttccttccccatcagaatggcatctctactaccccctgcctacattgtatcccatgtttactgaaattacaccataatccccgaaccagggcaaacagagttaccatacgtaattaccttccaaggtcggaatttttgacagcaatgatcaaagtatctgatgtaatgcatatttcaagagaagcttgaagctgccaaggaattctacaactttcaatccaaagttcttttccatctattcaaccatctacgatctgcagaaggacttgtttcactctagatcaacctgaagtctttccgacttggccagctcactattattgggagcactattaatcaaagacaatctcccatagaggtctgctttctggatcctaggtagaacggatggcagaacaaggacaagtgatcttcctagctcatctggtttgatatacgtgtaacgccttgtgtacattgttgcctgctaggcctgagttatagagtcgagttcctgttggtgtgaacaaacctagtgtgcgatagttttagtggtggtttttcatggtttcttgcttctttaaccattcaattcatctcatattgcgtgcactttgacctgattcctcagtaggcctcgtatcattagagatgtcactttatcttctgtcccctaagctgagggtcatatcctttgcgaaattaggagttccaaatgtattcgttcagggtgaatagcgaagattctgctgaacctaggaattggctcacggccaacctatttaggacatcggagacattaaggttctgaatggattagttgtggaagttgcacatgtgatcatctccctctagggctgaaattggaacatcggatgattatataaactgttagcctatcacctgttcatggatgaattagtccgtgccaaagcagggaagtgtagactgaccctaggagattacacgaaaagaacttgcaatgcaacgtatgtcgaaagttgataatgacacagtcggataggatgagccattaatatctgactcaaatgactttgccaatcagatcactaaacgagggaactttgtataagactaccagtgtagcttttagcgcgccctatggggatgagttacacaaccacgtgaagcaacatgcataacaaagagatcgaggcaaaataaaacaaagtcactagtacccggacttgaacataagtttgtggtgccgatgtgagagaagtgtcacctgggccgcgacactaattattgattattctgaacctccacgggttcgtttgagtggctgtatgaggttcggagataccgaaccctatgtacgtacctaaggttcctactcggttatttcgtcggccgatgtcgaagtagtgctatgtaccccgtatccgtacccatcatgggacgacgcgacgcggtctggacccacagaatctgtagggagtacggagcagccaagtgcttaatgcgaaacagctacgggagggcagctggaatagggcaatcttcctctgctcttctagaaggcgatgtatgccgtctgcaagctgcaagggcggcattccagacggagcatccacgagcaagacgaaataagcaaaggaattcatacatgtcttcattggtagccgagattagtatccacgcaaagcatagcatatagcgcaaacccccgaaccgaaacggaaaaaggggaacttgggccgaattagactgccgggcgcatctcatacgcaaggcacatgtgtggatacaaaagtttgtctgatacattcccgaggatcctaaggtaggggtgttgaccgagacatctaaccacatcaaaccacgcgtgaattccaaggttgacatgtttagcgctggcaactgaccacgcgaaatgcgagcacgtgcgtgttattatcaaattcaacccgtggccgaccaagccttgtagaagctcacttggcgacgcctcgccgggacgccttttattgcttggtggtcttggaatttcttgggatgatgcgagcgacaagagcaagctttagccaagagcctaggaagtcttgacatgtagatgctcgcatgtctcgatttcagatgcgttcgtggtcccaaatcggtcgaaagtatacaatcctagtattgatagacgcggatttcgcgtggcaactcgcattgatgttaatctaatcgatatcatcgagtagataccccggctagatcggaatgtagcacaacagtgacatgcaacgcgccaacacgtgttggaggtaagttcagatttcgagggaaggtgcgtaaaatggggttgcacatgttccaatgcggcccgctgattggccacagatcatgcatggacgatgtcggggttcccaactagcgtggaactgcctcagccactacgtcaatattaaatggtccagatgcggcccgttttgggacttggggttccatatggaagagattaatgggagagagattgcttgttcgctacgaggcggcgtagatattggacaatggcctcagaaaggctgcacgtgtgtcaaagcgtgaatgttattctgcttggaaccgagatgacctccggctccgggactaggtgtttggaggttgccacttggcccgaggcatccaattgcattggcattgccttggcgtgaggtgaggtttagctaaggatgcagtctatatagatcctgtccattgtcgatgcttctgcatataacagcctaattgtagatactccgtacatgtatgtaggagtaattatttattaaacatctaactcaaacggtgaacagaatttatcggccccgcgaaagtttgggaagatctgccttgaaccgcaggcggtggcaagcagagttgggattctgcccccacgtgcgcgtttgattggtctccggctgccccatatcagacccaccgggcccactccgccccacttcaagtcgaaaatctgcttccggagccaaatccagcaagagtagacccataaccgcaccgagacagggccccggagggccctgaccccgagatagagtggttcctaccttctgactttccaagactttttttcttttttgccaattttttctgagtttgaggtggagacgccactgaattgtgccgttgcatgtcgtccacgctccggttcgctcacttctcactccttcttcctccatccttttccatacttaagaagtcaatcgccgcctttctgggttgaagtcactcaccttccccaaccattgtggtcacttcgacgcttccctcccccgagttgaagcttacatcaagcaaggttcttgctcacgcgacacatctcagtacactcctacgatgaccgactttggtcctcgtgcccctcatgggcccgacatgtcgggagaccataacccgctggaggatatggatatccatgagaagggtgctttcgattctctcattcgccccgacgacagttacaccccccagggtgtctactgggccgatctcccattgtggaagaaaatcacattcgtcacctcgtacaacaacatggaggcaaagcgagagctgggtggcatttgggctatgatgaagaaagaccctctctcgcccgtctcctggtacttccgcaacatggtcctgcctggtgctggtctcggcctcgagggttacgtgctcttctctatcggcaacatcaagccgctgttccaatctgccttccctgattgctggaaacacgccaaaacctgcagtcaagggtggatctacgccattgactacctcgagatcatcggtatcatcgtgggtcagatcctggttggagtcttgggtgactggtaagctacaattggactcctcgtgggaaggagaccgtattaacgcacgactaggctcggccgtcgatggggtttgatccaagacgccgtgatcatgcttctcggtcttatcatgttgactgccgcctggggtgtgacccagaatggctggatcatctgttacgcttggtgtctcttcgtctacggtatcggtgttggaggcgagtatcccatgaccgccaccgccggtatggagaacgccgtcggctctggaaaggtttccaccaaagaagatcgtctgcaccgtggccgcaaggtcaccagtgccttcctgatgcagggttggggtcagttcttcaaccaggttgtgcttatcattctcctgctctgcttccaccacggcagtggtaacaacccttactccaccgtcgctgttcagtggacctaccgtgtttccttcgccattcccgccgtcggtactttgtggcttgtgtactaccgtgcctaccacatgaaggctgctagcaagcaacttactgctgccaagaagaaggcctccgtcaccggttatgatgcccagtctctgaagctgaccttcaagtacttcggattccgcatgttcgccactgctggcggctggttcgccaacgatgttttcttctacggcaacaagctcttccaaagcgagttcatcaaggttatcagtcccgaaactagctctgtcatgcctacctggctgtggaacttggtcaatgtcggcgtctctctgtgcggatactacatggcctctttcctgatcgacaacaagctgtacggtcgcaaatggatgcagatcgttggtttcatgctctgcttcgtcctcttcgtcgtccctgctttccacttcgactactaccgccgccccgagaacatcaaggccttccaggctatgtacttcctgagctctttcttcaaccagttcggtcccaattccgtctccttccttgtcgctgccgaggtcttccccacacccattcgtgcctccgcccacggtatgtccgctgcctggggtaaggccggtgcccttctggccgccgtcctgtacaactacatcgatacccagaccaagttctacgtcgtgccctggtttggtctcggtggtgctctgatcaccgcgctgttccttcccgataccaccggtctggacctgaaggagcaggagcgccgctggcaatgtctccgcgagggtcgcgagcatgagtaccacggtcctgccgtgcaccccaagcacctgtcatggtacgagcgctacgtcctgcgcaagtcccgctactacgatgccgaacttgactaccaacagaaggtcaaggagtaccgcgtcgagtgggagaccgccatggctgccaaggtcgccgagaagcaggcccacgagcatgacactgatgaatcgcttctcgagggccacgtgcacacatacttccaccgcactagccctatgttcaagggcatggagaagaatgtgtcttccaaacaggataccttcgccttgcctcccgctgcggagagtgagtcctcggatgcttccacccatgagaagcattcatgagaagcattaagcggctagtttgctcggtcctcaggttattgcctgtgatgtgaccatgatacctttttctttctaaagctagctatgataattccccctttttcaaaatttcaattttttctcaaagaaccatgcatatacaccaagtcgctttttacctttatgctcgctatatgaattgcatgacttttgcttgacgcaagcgagacattcgattatttagatatttataccacttttggacttattgctgtacatcttatttttgaagaccgttcattgtagtcaacaatcttggagagatgcctgaggcagagtggctgactaacatcatattctcctccacctgagacatcgatggatgtatatgaaccgaaccgcacacttaattaaatccgatgataccctaaacataaaacccaaagagaaaagaagagaaaagaaaagaaagaaccatgagactcttcgccttcggctctaatggatcaggccaactaggcatcggccacgaagaagacgtctccacaccaacgcaatgtctcttcgagcagccagagccaccacaaaacaccaatctccccgatggatcagaaatcatcaccatcgcagcaggcggaaaccacaccctgctcctaacaaccaacggctccatctacgccgccggctgcaacgcagacggacggtgcgggccgcacaaagcaaccaaaaacccgaaagagcccgagtccgacaacaatggaaacatcctgcgcttccgtcaactgatcatcccagacgcagtctccgacacagaagtatccaagtttaaacatgtttccgcgacgtgggagggcacgattgctgtagcgtccatgccacgacgcggcagcaataacaataacaataactataacgtcgtctacggccgcaatccaaatccagatacagaagatcgagtctttgtatttggctcctcgcccaaaggggaactgggtgttggtccagacacccccgccccagtcccaggtatctgtatcccctcgttcccaccagcggggttgaggatcacagcgctggcgagcgggatggcgcattcggcagctgtgctctcgaatggggatgtttatggctggggcgcggcgcggaagggccagcttggggaggagaaccgcggggctaggattgcttattcgcctgtgaggatttgcgtgccgttttttgcggaggctgttgcttgtgggagggagtttacggttgtttcggggcgcgggcggttcgttgttcttggggatagggagaatcggtggggggtattgcggattccggaaagtttgtctttgcgtgtggatggaggtttgggggatcatttacggggtgaggatgaggaagggcattgtgaaggtgctattcgttatcgatatactggtattgcggctagttggcatggggtttatgtacatgctgcgcctgggctgggacggatggaaccgtcgataacggacggggcgttatgcaccaagtctcgatttgattctgattctgattctgtctctgtcggtggttccatcgttgcttgggggcgcaatgatcgaggtcaacttccgcccccggatcttccgactcctgttagactcgctgttggtagtgagcatgtccttgctctcctaggagatggtcgagtggcggcgtttggatggggtgagcatgggaactgtggacccgatacagattcacaagggaatgtgtcggggacatataatgtgattccgctccccgaagccgtaggagtggatgggaaggttgtcggagttggagcgggatgtgcaactagctggattattgtgacatgatcgccggaatttgggagcgtcaaaggttgttgacaactgcactgcccctgacagggtgtgtgtgctcagtcgaagaaaccatattggcgaacctatcaactatcagcatacgcctatcaaagtgtcgcaagagccagaattcacatacctgagaaaaacgttgtgttggcgggagacccgtatcatcgtttggctcatcctctctcaacaaggcaggctccgcatcgcgaatagttgccccgaatgcgtcctgcgcgtttgtttagccacccactatacccactggggaagaaagaaaaccacatacctgtgttcccgacgcatcccatccaagaatatcctgcggctcctcttcgtccttcatctcatcccactgccggtcatcatcagcaggcacgaaaaggctatcgaattccatcgaaagcccagacgccgccggccgatctgcgctagccctctggctcagattctcctgcgtagacgacccattgagaggacggatggatctggttcgcggtggcggtgggggcatctgcgtatttgtcgtcaccgatgggcgagtatcacgcgacctgctcgctgagattgggataggcacgggcgtttgccgtgggattgacgctcgtgttgacgtcggggcgtcttcgctatctgcctggccgcgggtcatgactgtgaattctgcgttgatgccttcaaatccgtactccagctgcagaggcttgcagggtcgggtgtaccgtgctgttacgctggcgtttgccgtttcggcgtgcgcaactacggctttgaagtctttcaggttgatcgcgacgtgcatgttctcttcgaccaagtactcttggaagtcgcgcgtgtctgctgctacggatgtgtggacagggtgttttagtacttctgtttgggttgttagttaaaaccgctaagatttgatggaggcgaactcgacatacccttgccttcggtgatctttgttgtaaaactcgtgaacaccgctctgccggaatcggagtacatgtccagctgctcggcagataagctgaagtgctcaatgagctgcttgaggaaccgtggatcagctgtccacatgctggtagctctggatttgtcgaagatggcgtgctgaattgccgctggttcgtaagtcaatttatatgacttgatcacgcctagataaattgtcagagatgtgcagtgaagccaaaagatggatatatgcaagggtatcttacctagtccacagatcattttcactgtcagtctacactcggcttgctgtagatcttcatgcaattccatgtcacagcgttcaacggctgtgtccttgtttctgtcagttttcccacgaaatatggagagaagtgcctgtattctatatcagcataaagtaaggaagataaccacggtaaatatgcggtatggtacagctccaaggataaaaaagtctatactcactttgttatagatctggcagaagaatcggtccagcgaaacactgccacttctgccattactgctggaattgaaagaatacgcctcaaagaatacccccttctcgaacgcgaaggaggcaaaccccgtcttggtagaattgagcgcactgaggcggagctggagcacggttagccagaacatttcatctgctggcttctaaaccttgaactgaactaaacaccccaagttaagaaagataacttacgatatcaggctctgcttcgatggcgactgtttcgctgaatttggacaggcatattaaggcgtcgtggagccggaccaaggctaacgggcctaacgacaatgagagcgacgtcatggctgcgcctcttggtggctatcaaatgtgttcagcctagaaatgatgtgtagatatcaatttacgtatcgcatggcgctcatggcgcgctgttggctgttcgagattcgatcgagtgagaagacgcggacaaacacatgcggcatagcgcgcaggctcgttttggcctgattgaagcctgaatgtctgaaatttggcctgaatttagaccgcctttaggcaaacgaccctgcccaggtgcgcgctagggattacataagcttgtacagaaatattgccggagttcaccgccatttaaattctgccagctcactatgactacaagtatcagagatgtgcagtcaacacagaaaagacagatctatgcaagggtatattacctagtctacagataatcttcacagtcagtctgtgaggtgccagatccatcttgaagaagaaaaaggagttcattcgactaaataactaagatggagaaagaaaaagaactaagttgcaaagtggaagcagccagttgatatcagctggccacttcataaacgttgcaaacaaccagccttctcgctcagtgatctaacaaacaatctagtttactatagaatgcgaacaagcgagcaagcaaatatgaagcatatgatatctatccttgatcgtgacatttgagatataaatgtaacacatgtcgaatttactatgcgtttagagctggaccacttatgtgaaatacgttagctaggtatgagaaataggcagataagagaaaagccgcacaactagtggctactagaattatgttgtatgtcaatgtctctttgagattaactagaagaacgaatataaaccaacggaaacttgcaataatcgtatctcaacataaaacatagattcatatagacatttaagagggaccaacaagggactctagtctactatagacagaaccatgaagtaattacattggagcgaggcattgcatcgcctgaaaagcaaatactgtagcagcttgctttccgaatcataaatgataagagccctataaaagaattttagcgtcgttctctgtaaaaatgaaataagaaatcccaatgaaactaaccttttgtcccaccatcgattggatcgttataactagagcttaggtgtgataaattgcccaagtcatcggggtgttgcccgtcgctttagtcggggtctgacaagacattgtacccttcgcaccaatttttcctttccacttgaacttggcgatagaagagttgatgacgtaaataatgtcctgattgccaacataggcaatattcaagacctggccgccttgaataccaaaagcacaggtgccatactgagccagctgatgctgcctgcccacggcagggactgtccaggtaccaccgccagcaatatttttgacaagtacctggcagtcagctacgaggggagaatcaccactgctttgattgatgaaggttgaggatccgcagtcgttaatggaagctcgtgcttccaagcggggttctttgggggccaatggagcagcttggacaaaggccaggatgataacaaaagttatagaagtgggaatcttcatggtgaaggagaaaagtgttgcaaaataagttccaaaaggctgttaaggaagagaacgttttctgacatggaggaaattttcataggttatagcaggattctgaagcccttttatatccattaattctctgcccattaatacgttcatgtcgccgaggattttagtaaatgagttgacgtgagagttgcttccgatttggagaaagcgccaacgcgaagtatccagactaatggtatagtagccatttgacaagtatgctgtggagcactgctagcatcaccattgcaaatattttagaatattgattttaagttagcaagattgacctcattacgacctctttctatcactattagatgtccccgaagccccaaaggcagcaagagggtcagaactcaacaagaaccatgaggttattcgacgctttattgcgtgcacttcaatataattcaaattaaggatgtggtgggactgagtcagaggtggattgaagtattgagccacgaatatacctaggatgataaagatccctgcattatgaatgagcttatattccagcctatccataattagtgaaggggagctgtaattcctccgtgaggctgtccatactagactcccttatttgtccccctcatatgtctatatggataggtacacgcgtaattaagaagtcttctagtaaagacacttttcaaattgtaggatctatagtgagtggtattggaaccgggctaatcgctctcggttgatttaacggtcaagcggtgactgtacatgacagatatggagaccatactataacgcatatatggggccaactagatcacagtttgtgacttggacacacatcagatacatattagaggtatatcaaagtctcataccccatataggtccgctctctgtaggcagtactcccgaggcacatgactagtagccgtagttttctacaacatagtctaacaagagtagggatttggtatctgccaaaggccatggatctaggacggctgctccgtagaatgtgggcactctgtggctcctaaccttccctgatattaactcaattatgagtcctaagttgttctttgcacgtttccctaagaaggatgcggtcatgtcaatgtccgctaaccccacagtgtacgggatagctgtaaatctcaataaacgttcggaaaaaatccgagctcgagtattgtaagccaaactagtattcctggggagggataacatgtgatggtgtcagagcgtttgctaatgtaccagcgtgtactagtgtgcaactatgctctttcgtttcgttttcatcgcagcccttgctaagctaacgctaaatcgtgtctccgtcagtaggtctattctcaaaatattgaactaggatgagggtagttttgagaaatataacctgccctggaaaagcttcgagccgcgcgaaaacccacttatggcactattatagctcttcttttagtccccaaatatccaggttgcagcttggagagactcgtaatgaaagtggcggtggctattttggaaaaaaggaagcatagccaattaggaagaagagacatattttatatgcaacataccacctttatttgagtgtaattgcgaaaagcgggcggtatgcgacagaagaactatatttttaacgatagactccatagcgcggcctgcccctaaccaaatgtgtaagtccagaatcagtacagaatactgctaccaggcctcaatattgagctagttagcgtaggctactttgtacacatgggctgacgggcagatgtccaaatggccttagttatctgaggtagtttagtcatgcaaatagtacttctcacaataaaccatagtatattacggccaaatgtgcctgtcaggatgggcacaatagcgcatatgtagcgagaaatctgtcaatagccaaaataggcaaatcgggtagatccggagatcgcccttaaaggggattcttgaggcttaaatgcgtgaattagcaccgctgttcacaccgccctgtacgatgtattataaattttaattacaagttaaaaatatgaagctttccgtcccagaaggcttcaatgccgagaaataagggaattctaggcgttgtgtcacatttgacgcccattttcgaaggcattaatgttttcgacgatggcgttgttatggttaattcagatctttcaattttctgccgctccaaaataaggcagtcaggcatcaagcccccccattttggaccctgtggttcatctggaaagcgatgcccggcccagcccagaccgtagataccatctcttaccttagcttctgtatatacatatggcttggcccctttttttctcttttttcgccgtggctttccgattcaccggtgcccggaatttgtccatcaagatccactactccgtacttttattctgttcattgcggagcgaagcgtagcaattaaatcataacctcgtgtatgcatgtcacgtgtccagatggtttgtcctatgggctccaagatcagtagttttcatgcggtgaagaagtagctcggcgaactttggcagaataaccccaccggcagaataaatagactagagaatgaaccatcattgtcttccccagagcttctacagtcacactttgcgtagcattagaagttagaatcagtcgttttgctctgcagcgactatcgggcggccgtaggccgtccagatccctcgtattcagcactccgtagaacggattcatctacttttccagtggcgcagagatctgccttaatttccctaattgatcttagttcttagtaatcttagtaatcttagttcttaactagtaactattaaattattttggcattcctctcttttgattcatagcataccagctagatgctagatgctagatgctaggtagccaatagtgctccggggcctttactatatcaaattgaaagttaagaggcccattgtagataataaatcaatttgagtgtgtaaaaataacgaatcaagtaacacgctatttatgagctagttacaaaatctgggtggttagactgtttcttatactccgtgcgtacgggctccggagtaagtaggtttgtgttctaacttggacctttctgccttggcctaaagaggaatattcccaaaagaaaataataataataatgagaatataatttttctttcttttcaagggaaaaaaacacggtatcatggaaaatggtccagagttgttactaaagtagagaatcgaaaaaccgcagtttcaaggaccattatttgtacaccaacctataaacaatatgattctgatagtatgagcctacgtctatccccggttgtcctggctcagaaacgtagttcagaaatataagttgtgggaaatgtcgagaaaaggtaccatttgtatggcaataccatacaaaaggcaataccacaaaaggtacttattctactccgtacagatttgtaactaagctaattttttttgcattaaaccctgcggcccaactcggaaagaggtgtattgagaccgtatgtatcagttggtaggtgggcgcattgtatacattagggccaccccgtgcagtggagtctatcatttggccccgggctttgctgagatccctccaaggagatcttccaatcacactatgcttatcaacttctttctaggctggaagtatcttctgccagcgtgggacctggatcttgcttactttcattgtcgcctttcacaatgcttttgaaccgcctagttcccacttcgggactttcagcaatcagctcggtccaggtgctgcggacttttcttttctttccgttcttctatgttttactcatcatggccgcacgcagacagtcttcccgtgacccgtcctcaatatttttcgatccaacaaaggcctatgatcctgtctattcagctatcaggcttgagcaggcagcttctttcattgataaagcgaacaatgctacagagtcgcagatacaaagaggtccacggcaacctaaattttgcctgggaattgccaccattgcgcgaaagggggccagctatttccaagctactgtaggcacattccttgagggcctgagtgaggaagaaagggcagacattcacttgattctattcatcgcgcacacggatccgtcacaacatcctgcgtatgcagagccgtggttgtacaaactagcggatgaagtgttgctttacaacgcctccgaaatcgacattgatcatatacgctctctagaaacaaatgaggccaaaatagcaggccgtgagaaggctctctttgactacacatatctgttaaacgcatgtgcaaacatcgacacgccgtacgtcattatgcttgaagatgatctcgttgctttagatggctggtatcatcgcactaaagctgctttgtcctctgcggaagaacagactcgagaaatgggagcggcgaattgtgagttttacagccattatggaactccttaaatttccttgctgacagttttcttacccagggctatacctgcgccttttttacaccgaagaatattttggttggaacggtgaagaatggcttacataccttttcttttccatccttgtcgtctgcttcgtggcctgcgtccccctggtcctccgacaattcaatcaccatgcccgttcctttctaccgaatatgacaataattatttggagtggtatattcacaccattgttgattgggctcttttttgccatgggccgtgtgacgatgctccctcgagcaaacggcgtgcatcaaatgcccagatttggatgttgttcgcaagcctttgtcttcccccagtcacggataccggagcttgtcgggctatacacatccaagcatatcggatacgtcgacgtgctcaccgaggaatatgcaaatgcgagaaatgagattcgctgggcagtgacgccaagcattgtacagcatgttgggcggaagagctctaagggtgttgacaacgatatctcatcacacgtcaaaatcaagtcaaaggctgagttgacagttgtagagaagctttggaatttcgagtttgagatgaacgatgcagaagctttgcgcgcggaacatgatgctgtgaagcagcgagggggttcgtaatgctcgattttccttgtacatcaactttcagataaaagctgtttttatcctcttgatcattctgtatgtgtataatctaaatcaagagatagcgctggacaaaattcgaatcgtcatcaggtcgaatacttaatatcgatctacgatagattgctatcatatgcttcatgtttgttcgtttgcttgcttgctcattgtttgcattgtttactatattagattgtttgctagatatctaagcgagaagatttgatgtttgcaacgtttgcaaagtgattagctatatcaactggctgcttcccactttacaatttgcttcttctttctttctccatcttcattatttagttgaatgtgatctttcttgtttaagatctggtgcctcaaaatgagggccaactatctttttgtattcttcaccgggtgtaagaacatcggaggcaagcaaaggcgatgacgtccccccttccgaatactattagcgaatatcaacggaaagtcaaagggccagcaaactcactttctctgcatcatcgtaacctaaccaggctcgataaatcttttcagggaattgagacccaaacatgtaagacattttcatcagaatgtcattgtgctggttccagctccagatactatcccgcccagcgctgatcttgccaggcttgcctgaattagctctgagattgagctcaatcggatttgtttcgtgcgcatggtaaatgggctgaggaacctgaactgccttcaacccataataaagagcccaggatgtgggggacatttcagatgctaatcctagacctttttcgattttatccgcatgcatcagccggagtaatcgggccgagacgcgggacatagcgacaactgatgcccggcgcggagtacgtcccttttgacgaaagttatatacccggtcagcaaagggccagtcggtatgctgagggtcaaattgaggcagccaggtgatcacgtcggcttcctcacctacgccccagctccaaaaatcatcatcattcgagtctgagttgaagtccgagtgcaccggctcaggtgcttcatttccaacctcgataccttgtgcaggccgtgatccccagatactatcaagacctatcatgctctggtctacctgatcgatgaagttatcccagctcccgtggacagcaggtatataaaagtatgagttacgctcccacagattcttacgaggctgttgtcttgcaaaatctgctgcctgctcgagaaagttatagaaatgtccggtataacgcgaatccatttcaaactgccagaagaagtcgtactgtggattcacccgcgagaaaatctgcattggctgaaagtattgaagtatggccctagaaattattaacatttcgaaattcgcctgaagcagtatagaagagagctagaatgcgatcttactcgtgaacgtcgatcttcgggtaccagtctcttagtatctctgcgttgaaaaatactgccaaatcctggagctcccgcggaagcgactttttcagactgtccaagcctaccgtatcggctgggtgaggcaaatcaatatcttttgcatcaaccaaaaggacaacctcatattctgcaccggataagagtgatagctccattatcatcgaccggatataataaaaatcatcttccgtgtattccctgccgagccatgtacgcaggactaccgcggtgcgtgatttgagaatagcagaggcattgtttcgatctgtccgcatcttctctccgctccagcgatgttcatctgtttttttatcatgctccttgtggagagtccacatcttctcgccaattttcgaaggttgataacggttttcattgcgatgcaagcagtcttgttgcaaagtggcccagttcacatcctgccacttcacattgttgcctttgttgtcttcgtctgcttcgtctgtttcgtctgcatagccgtatggcgcataccgagaatatcggtcggtgcagagactccgatcaagcttccacgcctcgtacgatccaaacataggcatcggaaaacctagcatgctatcagtgctcgctgcactactgtatgccaccataggcttgtcctcattccatacctgactggttccaacgaaaccctttcatagctgtttccgcattcctacgatccaggactagaccatttggaccaacacactgctggtaagatcctttccacgtgtcgttccatgtagtgctgttatattcgggatatggatcgtaaggtatgggtagtggctcctgcgaagtttccaaaacaagctgaccgaggtcattcccatcaccagcagcgccagatcctaaataaaaggcatttcttctactacaaagagatgggtatgttagcgattgcacgaagactgccatatgaagcgaggcctggatgtctccagaagccctattagtctagatggtcaagtataccttgaagcatagactgttgggctgcgctgtgctgtagtagcttgctctcttggccaacgtaaaagtacgaaaattgtcaatgcaaagctaaacgcaatcgcaataagactgcgtttgagggaagtgcgccataaatgtcggcatcttagcacgaggtagtcaacgatgtgcattcttgagatagaccatatgatctaaacagtgttcgtatgcatggtgagaggaaaaggagaatgcacaaacacaaattatggccgtaccatgggcatatatcccattggcccccaatattgggagcctacagaattccgaagttcttccgggggtccgcagttcaccccgtggccccatggatggatgtgtccggagtacctgatacgtaagtggtaccacgtagtaatttacatgccagcgggtacctagacggcgccttacccgatatagtctaaaatagtgtccagacagtacccggttctcgccaagcaacccaatccctatatctctacgatcactcaaataggaaaaatctcactaattagtatggcctgtttcttcattacaatattctatcttctgtggtatactttaatcgaaattgattaaagctctctactggaaaaactagcctgtacaaaatatacaattcgagaattcggcccccatattacttaaacaggttagcttagtactaatcaacgtcgtaactaatccaacggtaaacgaactgcggtcgacccacccaaaacgcgccataaattaacgcttacttaattcaaccaattcgctcccaatcatctacaaagttagtagagaaagagggtgggatcttagtacctatccaggcctttaaatctcttcaattcgtggattagcccgcaccttcaacgtcgtacacgcctacgtggtattcactaacgcgtgacttcacatctgcaaactgctatacattgactgaaacgggagaggaattacttcaaaaatgggtagtactctctgtggatctacgtgcagccggccttccggcattcttcggtacgaagtcttctctaacactaacaattaccatccgtgggctaagatgcgaaagtctaaactttcgagcgggtcggcccgatccatccgtgttcattccaagcttgttgctatgtaacccatcccataagaatgaaaggtgtaaccggtaagaaccgtagcctaggggtttcatggagtcgtatatccatatgttaaacaggcgctgatgtcaaaaagcttggggtgcaagaagacatggatatgaatatatccagccccaattaaggcttttatgtacagtcttggataaaatgccagatgataaatgaaaaagaaaacataaaacataaatatcgtaaataaaagagggtatattgcttgcgatgtaccaaataagttttcgtaccaagttgggaatgctagatatcaaataagtcggatccccctatccaacactaggggcgtttcctgtgacggggcgtccctccgcatcatctcgtgcaccttcctctctagcattcgtattgatcccaggatctgtattgaaggcacggtcttgctcctgatcccgctggggcaagggctgcggaaactgcatttccataaaccgtcgtctgcgtctgccggctcgaacagcatgcaggaagttaaccccaacctgggcgaagaagatggccaggaaggcgccaatcacgaatccctgggagacatacgtttcgtctttttgcttctgttggccactgtcgctggtttgatcacgttcgttgggtatttgcgagctaagaccggggaacgaaaatttggagctaccaaacgagacggagacagagaaagagtacattgtcaatgacgtgaatacttgcggcgatatcgacgtgaaaaatcccgacaatggccgcaatgctaaagggatgatgcagaagatgaggagagggacggatagtcataagacagagtagagtgatgagcgagtagacctaatcggaaatatcagcatagcatctaatggggagaagagatgttgaacctaccagtctcgagcctcaagttgtctcgcccattttgctgagagtttcagtctctctcgaacacttgtggcggcgagtaagggatatttctcttcttcggagatgggcaaaatgcttgcgaaccaccatgggaagcgggctgcatctgtagggatgggtccatatgctagcatgacgcgcgggtgcagccaaggagccccagatctgcgctggttggtgatatactctcttgctgagaggagtagctgttgagttggcattgagcctaacggaggatcagcttcattcccttctgacagagcatttacaccgcctgttgaggtctccaacgactcaagtcgctcctcctctgcgagcgagatgtcatctacgcgctctgttttggcaacataatagccatccagcattcccgagtcgacgatcttgaaccgcgatacgcctgtagccaccacgagactgcgaccatctggaagcagctcatatcgctcgatcatcaatagcgttccgtattgcataaacggtgcgtcatgtaattgacctggctgtacccggccttgccggttgtgcatgaccatgccgaactttccatttccacttgcgagaacccgctgaatcataagtcgatatctgggctcgaagacatggagaaaagtgggcattgtcgggaaagatagcgtgcacacaaaaagtggcaagctcttcgcgtaatccgcgcctgtctcatcctgggcgctggtctcccgtctgactgagatctggtcggggaaaaagtattcgaccaaccgtgccacaggctggtttatgggctctgactgtagatcattcggaatgcctagctttcggcgacaaatgggacacagatctgtatggtttaagacccgcgcgacacattttcggcaaaaagtgtgaccacaaggcgtcgtcatcggatctaaaaggagtgcatagcaaacctgacagtctaactcggcgcagagactgtctcgcagcttttggaagtgaatgagatcctgaacttctgagcttccggctggcgttgtggaatctccatagatgacttcgcatgcatcagacgggaaccggccttccagtgccaggctatagattcccctcaaccacccatgtcgcttcaaatgcccacttccgttcttattccgcccgtcggttttccagcgcagtaacggtccgtcatcctcggacgagtccagaggcacgttgtctgcctccgaccccagtatttctccaaaaaggccaaccagcttcccaagcagcacatcagcgccacaatctgcaacacaatggcccccaccacacgtcttatttcctttccaaaggcatgtgaattcctgattcctcccctcagtcacggggtacgtaatacctgtccggggccgaagggcgggcaaacattcccgacagatcgaattcccgcatggtaggcggagcggagttcggaaagggcgggagcaatgttggcactggatcaattggatcacgatatgaggtagatctgccgtatcgctaggtgtatgttcttccgagcttgaaacatctgagcttgagtcctccgggctctccattacggtcgggataggttcagcgtcggtcatttgtgtcaggctcagggactcggctgcatcttccattacactgcagtccacgggtacaaatgcagtgaataagagggaaacgtagaaggataaatgatgaagctcggggggtgggggatccgctatctgcaggtgctcaggtgtgggtcaactttagataatcggatcagtgaccatcccgaggtccggtgtcgcagtacatcgtttatagtagtggttatacaaagaaataatattaattgcgtaacgaaacgaagcaaagcaagtataaatcaaaaggtcttacgtacgtgtcacgtggccaagtttctcccagggctgaaataatagcgttctaatgggccatcatgtgatcatcagtcgcttcgctctgcaaccatccatggatgtcattctcaatgatataggctgtaaatgcatccgacttattcttatactaattatgcggaataaaactgatgatgctgctaagcagtgagcactcaatcggcaaccaaataattatgcattttccaaacgcccaacaagtctccgcgcgatgaaaagaatccgacggcgtccatcccacaaaggatataatccaaccgtcagcaaagtgatccagagccaaatttcagcaaccacaacccaggcgatgaagaactaaatcttgtcagtgacattgtccacccttgagaaaatatagtgcacttactcctctgctgaatataaacctagcaccatacatcggaagtggccagagaacccagtggccgaagaaagtagcaacggcccaaaataacgcgtatcgtgaccatctcctttggcttgactcggaaagctggcccgtttcatttctctctttagtaacctcggtaacttcaccctcagaatggatagccaggtcgttattgctcatcgacttccagtcgaagtcttccggtgcaatcaatgtaatcaacacggagtatagtaacgggctaactgcagatgccactgtgccgtacatgcatggcaatgtctgtccagttgaagagactgtaacggcaccatagaaatgatgcgctgttccgagccagacagcgaggcccgtggctagaccgagatacgccgacgcaatgaccgcgatccggctttgctttctccaaagaatcgacagtatcaggggaaatatcccggggcaggtgatcactccttcgagttatgttagaaacatcgagtatatccttgatataagtacctgagcttaccaatcatgtaaagggtccagcccatgtcaatgccaacatagtggaacattgcagtgaggcctgccgcgacaaggccgaatataatcactcccacccgactccagaagattatctcttgattgtttgcattcttgttgaagtaggtgcggtagccatcaaaggccacaatcgaagagacagcaatgacctgtgctgacagtgtagacgtaacagccataaaagtcatcaggagagtagccactgcgccacctttgcccgctaccgcgatggctgcgtaaggcaaagctagtccattcgtgacttcagtactagtcatgggctcgaaatatcttagcttcaagatcaaatatcgagaatcgatggcctggacttactctcggatatgttgggaaggcctttgtgctctccaatcccaacgcaaccatccccataatagttccaagagcccaaggaatactgaaataagataaacccccaatcacgtatccaggaacgacaccttctggggacgcagcaaatgccttagtgaagtatccggtatccatctattcccaattagcaccaagccgtcagtaattcggggaggcacttacaatgacagctccgaagtttgacaccaaaagaatgattccaaaaaaaattccctgttgagatgtcatggtaaaaagcgagccttggtaatttccatccacgagatgatttggctgagctgcaatgacaagatcatacaaacccccaatcgacttgacctccacgctggtcaacgctttggtggtcaaataacaacacagaatcaaaataatgaaagtgtgaatataatcagttagaaacctgcaaaccctattagtgctgtggacatattttgaaaaataatctgacatacgttgctttgatacctccagtgagggtataaatgaccacaccaactggcagcaggaaagtggatgccatgatgtgcatcccagttctttcatggtaagccgattgaccacaagtgttttcgagcgcggttaccggacttacaaatatgtaatggcgactgaagcacctaaaatcatgttgatggtgttaaagagattattcaccacagccagaaaggtgaagcttaagtgagcgacagtgccttgaaattgttagttttcatgtttcactgacagacacgtaaagtcctcaccatatcgcatcttgatgatttccagaacagtgtgcgcgctgggcacacgctttttacagacagtgccgagatacgcaaaacagacgatcataggtgagcatccagcaccataccaaaatgggccacttacgccgtattgataggccaccaatacggcactcagcaatgcagtgctccaaagccaggactattgtaggttagcactgaatattgttaagcatttgttcacatacagatacaactgccgaggcaactaaacccgtgctgactctccgattggcaacaataaatctagttgggattaaaaaggagtcagatgagaagcttggggaaaaacatacgtttcagcattcgaattatcttcgcccactgtacttttcaatgccttggtgacaaatatcattccttcattattcttagcatagtcataagaagagttgtgtatttacgtcctacctgctgcaaatgacaacccaacaccaatcacgactccataccctacaccttgtgataacgggggagatatgtcggacatggctcttgaaaccacaagctgaaatggggtagaactgagcggaacaataatacctggcaattgaagccatcgtgagatttatatggggtctaggaaatgtcggctgagttcaccttaatctcaagctccaaacattgttccacttgaaaggcttttctatgcaagctaaccatttcaggtaattaaaaagagaaaactcgctgctctagagccaaatgtgagcaatatgacgtgctcggcgtgcttcatggcggagcttttcagcaccgcaaataaccagggaaaatgatgcaatccggcaatttggggtcaatttggggtcaatttgtcagtgaaatatggatagttaccagtgcctggataaacatagaaaggtcctctatatggtctagactattagctacaaaaccgagaagggggaggaatatgtacatctgaaaagacggccgaaaagaataccgcaaaagacaacgaggcatacggagtaggaggccgactattcttgtagtcaactattgagatttgaaatggagttatgtaattgagaaacgtgtgtacggagtagttaggggattccttggtcaatgtgctatggagcgttatggtgtcatagtatgcccaaattactatacaaaacatatggagcgagcaagagaagaagagagagaaactcgggatcgaggaattcatgtgaccaatcttgcaattaatcaattctcagctcccgagagagccgacttcaacctccgtaattggagttgttggcgcgtgcagaagcatgttctagatctattagcgcagctcattgtatggttattctcgggcagactgattgctccctatacaaaagcatttctaatcttaggccgactccatacgtttctctgaacataaagaagaatcaaacggaaacaaaaacacatgcatccagtatcagtcgttgggtgatggtgtcggtcctgaacgtttaatgatctttctgatcgaggctaccgtagtcaaaacgacggctgacctgtgcatgctgcttggtagggtaaggtgttgataccaactaacatcccatcaatcactgctctagccgacagcacgtatgcgacgatgaagcgcaaactgacgatttccttggtatttctccctcccacaacctgagccatatcaggaacgctatgacaccctcgatatctgagatgaaagttgcttaggattactaaaatgtaagcgttgagcgatccaccgaccgctcccagggtgtacatggcagttggaatggataaaacacccacggcgaacaaaatcttgatgaagatctctgaagtctttattcagcggacggtgtgatacttgattccatattctgtgtcgattaatacctcactctgttgaggtagcttccttgctcgggagtcggtgtcgggactcggtgctcgctctatatcggtcggtttgatatcggagttcctcggatgttgggtatctgtgatcgttgcctatttggaaatgtaactgaaacaatatgtaactagttacgattgattattctgttgattaaacggtaaaccacgctgtaactagttaactgtaataggaaggagcttgacagttaccccgggttacgaaggcccatagcgctcagggttcaaacccccctattctagagcggcagaagatttcaatacctgaattgccattacttatgtcttactaatcaaagcacgggatgttaagcccaaaggcttcatattttgaacttgtaattaataaatttacaatacactgtatagagcggtgtggagagcggtgccaagggttttgaagctgtaccgggtagattgccgtcggcgaagtcaagggaatacggagtagataagcatgcatgatcgatgcattatccatccactactcatgcattgacatatgcgggaaaaatgtggctacaggattcgcttaaagagaacaatcaagctgtaagtccgagacaggacagggcaatatgtaaatacggggtttgtccacaatggagaggagagcgttatcggtggccgacggccgttgaacccccaatatcgaaggtaggacggccgacggcgatggattcccccaacggggaccatttatatactcttggttagcaagaccctgtgaacaatttaaatagactctcgtctgaccaattcaactactctaaccgcattcctcattcctcaacacctgctccgtgttgttacacactgatatttatacacgaaaatatggcatcatcacaactttctcctttcaaggtgaaccagacacgactgcttgagtcgctacacacaagctgtcaacatggctctgcgcatccgtatggaaagtaaggtactcactctccggctttcgacctatgctgattgtgttgttatcagtgactccacggaaactggaatggctaggctcagtctaacggactcggataaagacgtaagggaatggtttattgagtctgcaaaagccattgggtgtcatacctacgtcgaccaaatgggcaatctctttgcgatccgtcccggaaagaataaagatgcccctcccatcatgatgggttcccatctagacacgcagcccactggaggacgatacgatggtatcctcggtgttgtcgccggcttagaagtactgaaagtactagaagagaactcgttcgagacagaaggaagcattggagttgttgactggactaagtatgtttcctccgataacatactgaacacttggctaataccgtacccaacagtgaagaaggagcacgtttcccggtgatggctatctcagctgctgtctgggccgaggcaattcctctcactacggcttggaatctgaaggaaatttccgctggtgataacacaacccgcaagaccatgaaagaggaactcaatagaataggttatgtgggagaaacgccagcttcattcaaggccaatccttttgctgcccacttcgagctccacattgagcaagggccaatattggaagacgaaggccgaaagatcggtgttgtgcaaggtcagaagctctcgactgattggcgattaaaattgaccattccaaggtgttcaagcgtttaaatggttcgatataactgtcagtggcagggatagccacgcaggcacgactcctctgtatgcgcgtaaagatgccatgctatgcgccgccaaaatgatcaccacagcgaactcgatcgcaaagaaggccaacggtctcgctacgacgggcatcatacactctgagccagggactgtcaacactgtagctcaaacaatcaattttagtctcgacctccgccatacatttgacgaagatctcgaaaatatgattgcagactgcatggctgaattcaagagaatagcaaccgatgatagcgagcgaggctgcaccgtcgaatggaaggaactggtcgatagtcccgctgttcattttgacaaggattgcatctccatggttgaagaaagcgccaaaactgttcttgcagatgtccctgatccaatttccgggggaaagcagtggcgggatatgatcagtggtgccggtcacgatagctgctacacaaatcggcggtgcccaacgagcatgatcttcacaccgactcggaatgggattagccacaaccccgtggagtattgttctcctgaagactggtaagttgtagccctggaaaaatctgcttatgatcatggctgactagtccagtgctcttggtgccaacgtcttgttaggcgctgttttaggatatgacaagctccgcgcgaaacgaggcgactttgcgtaagacaggaaagtgaacaaatgtctcaaatatctatcaagaatcaagcacacgatgaacgagacagaagctacataaataaatcaaagaccttgtgaaaaggagtaaagaatggttgacatatagtgtagcagcatgatgcttgaccaggcacgagcttttaaataatgttgcagctcgagttaaagggaaaatgtagcgaattcattggcaagagggctacacttattcaaggattcaaatagtctacttccttcgagttttagggcaaagtaagacgaggatgtgaaaaccggcttaagagttttccgcccccggttgtccaccaatcggcttcttcttatcaatcccctccctcacggtcaattctcgaactcacgatactatcgaggtaaaatgagcaaagataggagtgaaaccgctttcaatctcgataagagtaccccgacaattgaccgtgtcacgaacgcacgaaagtatcgctccaaagtacagaggccatgcgatttgtgtcggtctcgcaaagttcattgcaatatcccctacccatctcagccatgtacactctgcgagcgtaccaggcgatcttgcacatttgtggaaaagaccaaccgtaaacccagcaagaaaaaaaccaaggatttcggcttatcacaatcccctcgatctgacggtcgctttggatctactgcaggtgacctagtcccatgtacgactgttgctggtgcagagacaacatctttcgttgtttccccatctcagagtgatggaagtcaatctcaacgacccctcggcacaggtagtgaactaagctccacaaaaaagctttgctaatagctcagtgcagatgatcattttttatccgacatctctggtatgcctaacgaatcactgctagacaatcccctgatcggaactggctggcctcgcgatgatggcgttgactggcccacgttcaacaatgaagatttccagggcatgcttgacaccttgggacgagaaaccatttcggaactactgcctattgatggtttcagtactgctgataacagtccatcaaggtcacattctagccagcctggaggctcggaagagttgaccatcgatcagaaacctgacttctcatctcaaatttttggattttcgggcgagtctgacccattcctcctgcgaaattacccgtacgacgattcaggcgaagtgaagttcttcaggcttatttatagaatggcatcaaatacggccgctagtcccgagtccgaccatacggttcctcctgatggccaccagaggagaagctcggctggagacgtgcctgtttattttctgcagaaccatagccaaaccgtatctcagtccttgcaggcggtcgaaaagtgcatgttcgaacaaggcaagcacgcaccgagaatccaactcgacagtctcgtgagtccagagatgggagtgggactagtgaagctgtatataccatgtgctctcaataccggattcccttgctaatgttcgaaggtattttcggtacatcttccatgccctcccggttctttctcgatccttcgtctttcgagacatcaaattcttcgtgaaaaacgcctcggtcgggcttcttgccgccatatacgcactttcactacaatttactgcatgggacgatgttctttgcgttgacaacggatataccaaaccgtcttcggaagacttatggcgcatcgcgtatgcctgtgtgcagaaggagatgcacttcccacggctatcaacaatccagacttctcttttactcctcaacttcgacccttttgatccagcttccgcagagaatccttcggcgtgggctttggctagctcaacgctagctattgctcagtccttgggattgaatatagaccctataggctgggatttaccaacctgggagattcgtcttcggcgacgtctgtggtggtgtgttcttgttgaacacagttggcgagccgtcactcatggacggcagtctatactttcctacgatagttggaatgtgactcctcttactttggccgactttgaggtcaacctgaatcctgaagctgggcttgaggtggatgatggttgtccggattactttatgcatcttagttcactcacgcttattgccaacgatttatgtcggaccttcttgtgagttcaaactcgttctgactttccccttcttagccactcttgtcgcgttccatagccgtctttatcaaagacatccctgagttcgcctatattcactaaccgcaccaccagctctctccgctctgtctgccaacaacggtctttggatagcttgatagatcaggctcgagtgtttcgtcaacaactacatcagtggatcagcgcactgccagagtcgctgcaaatgccagcaccagcacagacacactcagaaaccgaggaagaaccagtcgatactcgcggtagtttgcacatctcatacttcacagttcaaatactgcttttccgtgcccttttacggccaatactcgacgacaaaatagggctggatcaccttcagccctccgttgcagccatcctagacgcgtcgcgtggattgattcgcgctgtgactcgtttagtttacagcctcggtgcccgacatcaatcagccttctggccgacttatacgagatcatgcttttcttatccggggcaattcagtttcatgctgtgtttccaacatagagagccgcatatgatgcttaatgaccagaagctcttgggtatttggagacaaacattgcgtacccgcgctccgtcttggccgcttcttcgctttgcggctattcgtgttgatggcatcttttggaaaaacttggtcaatgtcgcggcagcttcccatgccgttgatacctcaatatgagcccttttaagtgaaggtcgctagtaaaaatcaccgatccttcaagatcttcgccaaaggctccttcggaataccatgcggtgattttattttacccctgaaatcggcacaatgacggtccatggcttgattgaggcctgggatcttcaccgacagtccaatcacataatcaagccaagaaaaagaacggtctttgaacctcaggcttggcattttaccttcagtctggatgcaagagaaattgtactgtccaaatgtgtctggattcaagtggcccaataagatgggggatcctttccttgggccgtcaaaatatgttcatgtctatctactaaacccaagcggtctcaacgtcccaagacccctcactcctactgcccgccatcatactctctgtgcgatgcaaaaactgcccaaagcctcgagaacctacaacccctccatcttcccggtcccaaactatatggccacgaagcacagtgtagcgcggccactgctttaccttgtgcccctcgaatggagtgtagtcgacattgtgatgaaggatgtcgttggtgacagtcatcgcaagactcccctcggggtaccagatcacaaagtcggcatcactaacctccgggataagtgcaccttttctcgggtacatgccatacaatttagctgggttggttgatgtcagctccacgtatttctgtatattgagtcgatcggccgaaagaaccaatggcattcgggtctcgacaccagagaatccgttcggaatcaggtgaaactgtccatcgggacgttccgtagtcacgcttgatcctttgccagacgtcgagtcgttgaagttaaacgggctgtgatcggatgagagaatggtaaatgttccgtcctcgagaccggcccaaatagcctcatggtcggatttgttgcgcagcggcggactgcaaacacattttgcaccctcgagcccaggccgatccaggttctcgctgctgaggaacagatattggggacaagtctcggcatagattggaagaccctttgcctgagcttgtcgaatgttatcgacggctcgaggattagatacatgtacgattaagatcggagtatcaataaattcagagagacagattgcacggtagcttgcctcgatctcagcgacggcagggtgagaagccgtatggtactttggtgcgtatagttggcgctcgtgcaatttcttggtcatccacgcaatcacagagtcgttctcggcatgcaccatagtcgtgaccttgtgtagacgggattgaaacaagacatccaagaattgctcgtcgttgaggcgcaaagcttcgtacgtcatgtatatcttgacggacgagatgcccaagtctcggaaggctggaaattccgcaagcgtctttgcgcatgggttggatatgatgagatggaacgagtaatcgctgtagcattgatcctgggcacgttcgtgagcgcaagctagggttgcgagaacactgtcttcatgcttccgttgaggtgcgaaggccacgatggtggttgtacctcccgcaatcgcggcgcgggtgcctaggaatttcagtcaattcaatgcaacatgttagtcgccagctctgaatactagggggctcaccggactcgaaattgtctgcagtcgaaccgagtccaaatagaggcggctcctggaggtgaacatgggcatcaatccctcccggcttgaaagaggtcagcacgtggccatgagttcattcatgatagaggtaaaaaaaaaaccaaccgtaacaagagctcccttggcgtcaatgatctttttggcctttgagccagccaatgatccttgggggacaattgagtgaatcttctcgtctttgacgccaatgtcacattgcacgacatcttcaaccgttgccaaagtacagttcagcacaatgaggtccagatcaggattcaattgttcggacatattgggagataaataaataaagaatccgtcttaaatgaaacttacatttcggaatatcaagctgttcagaggggggttccactctcgaaccgccgtcggcgtcgttatctaaaaggcggggcatccaggtctgcccgtcggcgaacaaggcactttagatttggctcaaatccatgcatggaaatattcggcacttttataatgtcgttgagctaattggaacacctttgtcattagcagattggctgtttattggggctagccctttagaatccccgtatgcaggtttatctttgttcttctctgaccttattcgctcagctatgtctattagaagattcaactactaagttgtgatggttgacctgggaaccttgggagtattgtatgattacatagaatacatagctaataatacacatgaacgagacaccacagacgttgaaagatcattcaaaactggccaccaacggtacgcactgaaaagtcggccgccaagtgctactttcgttgtcatattgattgcttgaaaatcccaaatatagttgattcgagccgtgtggaaatggtgcgagatcttcctcggtgatccacggaggttgacactcattctgcctgaagatgccatagtcatgtatacgagcctcttcggggatgagtgctgcttgcgacctagttgcctcgactttgtgaggaagtgccactgtgttcacttgcctcagggcagggctatagccctcttccagtttcatcaatgtttccgacaaaacagccacgggagcgcatttgaaaaatccttgtatcggaggcgcttgtcgcagtagatccaaagcccttcgccgcaggcttgggtcacgacatctcaacacagtcatagcgagagggacacccacactcagctcaaaggtaaagggtggttgggcaccatttggccctactgaggtatcgagaatcaacctagactgctcgacgatagtaacgaagtctttaaagtggatatcgaaaacagtttcctgttgccttaagcatcctgtcacacaaatcaaagtagcagcatgatgcgtgagcaggataggctctgggtatatagaaacattggatactgagttttttctctcgcaagtattggtgtatgcccgatgccattgatcgagacgagctcgaagcgcttctttttttgcgaccatttctggactaacagcggaatccgcaccgactgctctgaggtgtaatttcgcctcgcgctcaaaaagagcaacttccgcagctatggcggatataatggttcttgcggaatcggcagatgcgaaaccagcgctcagatctgtttctacgaaggcgagaagttcagttggaaactgagtccctgaaatggtgagggaacttgtgcccagtcgcaggaataagggagcaatgctgcgttccaacagaacagccttactggtagatattcctccatggccgatttgggcacggaggtcaagtatcaaaatgatgccttgtcggtagagctccaaggcctgctccatatgtccttggattgtctccacacagatgaacagtgcgcagctgatgactgcaatgtacggatctgcgctgcctcgctggatctgtgaagaaacacccgagattgatcgcgtgtaccatgtcaatgcttcctgctgagcatgatcaagcaaatgtgccttgtttcggcgatctctcaaaaaatgaaagtccatgcactgctttggattttcgtacaatgcgctaattgcaatcattgcatcccacacagcgggctcactgcggcagatctgcggaacaacccccgtccagaaatctatattcattccacctgcgagatgttgggacacatgttggaagtaatattcaaatgcgcgacgttctcgtcgtcctggatttggagacgacagttcgaggctgggtgtggagggagcccagggagatacccctctgctctcatattcacacttccgtcctgtgctagagcagcgaaggcaattgggcttctcttcgccacatttgactcttcggattctggtcggcggtcagagcttaactccgaaaatggcggaggaaactcttacttgcaggttttgcatccagatcgagatttcacagcccctatacggtggctcatatctgaatcaggtgggagaaggcatagaagttcgggatcccacctacacgtaggtatggctggatgtggttcttagtccacactgtggaatactggacaggactacgggcaggacgttgaccgccctcataaagcggcagtccatcgggacggagtaaccacctcgacaggtctacagccctggtagacagatttgagcagtgctgcctccaggaagtatcgctgatactgtgtgggaaatatacgagctggatagcactggtttgctgaccaatgtcaaaattatactgatctacgccggtcaggaaatttgaggtcctatatttttaaaagtcatagattggacatgcgtaaatcgtcgctctgaatacaaaaagccaagcacccaatcagccgtcttgcagggtatatttgcaggacaggaaatttcaaatatcaaggcgtttattctgactgggaagtagtagatgagtccgattccgagtcggaatcttcatcaaggacgattcgtcgcatgacactcttgtcgaataagtccaaggcgaaacgtcgagctgggagtctataatgatgactttccagaatgcatagggtcttgcggaagagatgtgcttggtggaatcgctccggttgtttagattttaggctgtggttgagaattgtgagcaaatgtaagaagtcgcggaatgaaaactgagagccatacatgtgaagatcagaagcggctcttttggagagtaccgtgttgcccatatcgacgatcaactttaagatccgctgattgccgggatcggagtcggtggtggcttccttgagtttctccttgggagttcgcttcgatctataatcaaagccagggaaggaaatctagacggatgagtacaatgagacgaaagtgaagggacagaagatactcaccaagaataattttcggaaatcggtagggagacaaagtcccagtgaatctcccttttggtcaaccccggaatcccagcccaaaccccgcaggacttggagtccgtgtcgactgcgagatatcaagcccaaaacaaagaaagcagtgcctcgcatagtgagaactcctgcactggttgctatctgcacaatccgttggataatctcagcatccaagaatggtgcgccaagctccattgagccgatattgccgacagcccagaggcatcctttagctttgagaagcatttcgttgtcttcttcatccagcctgaaatcacgaatcgtccaagcaaattcattgaaatggcccgattgttctagtagcttacacccctcggcagttcgtgcaagttctcggtagaaatgcggtggtaccaacccaatatcctggaggtccaccagatcctcgggtacaaggcttccacggcgcggttgctcgacgtaagctcgggaaagagctgcctcaacaagaccgacatagctatcattgcggccaaggaaccagtcatccatctcttgggtgatgtaatcaagaccatccagatagtgatatcccacggaagtcgataggaatctgagaagtagcggtgcaccaatttcacctagatgatcaagagagggtcgacatttgaccacgaactccagataatcccgttgattgcatgcttcttccagaattttcacggcgacctggcagacagtgacctcgggatcatacaattgggtgacaagaagtttgaccacccattctgcattgtcaatcgccacttgaggcgaaagcgttacatccccaacagcatatttgcgtaggaatctggttgcaaatattcgaatatccttggagccaattgttaacgccttggagagcatgacgcggagatgactttcgcggctgtaatccatgtttcctagcaaagtctgaatcagatcgttgcgatcttgcaactcaatgatgtggtaaaacatgttgagcatatgccatcgttccatcatgagcagcccgttgacatcgccgctcaatgaccctagcatcgcaaagtagcctccactgagagtattggccatctggtctttggagaaaagcggggatgcagacgtcagaccactcatgcggtccagttgggccagacattctgcaacctggcgaaggaatttgttctctgccagatacttggtgccctcgggggtcataacgagagtgcgcatgagaacacagccggttcggacatatcgttgatttgcttttgtgtttggaaccatggcaaagcgatatttgaaaggtcggtaaaacccaatgagacgtttcatgaacttggagcctttgattgcctcatccattctttttggattcgtaagaggaccctccactagacgatgaataatatcccatttccacttattgaagttgacggtgttcaggacatgagtctccagaatagcattgcggaactgggtctcgtccatggaaggactcatcttgtccttcccttgctcagcagggagcagagaaactgataaatctgtctccatgttgtatcgaccctgcccactgggatatccaccagaacgcgccaatgtccgattgatactatcgatttggaagatagttgcggttgaaaggtcgtgattctcagtttcaaagtcgactgcgggtgggattaggtgtggaagcacttgaagttgtgcgctgacggcttggggtaaagaatgctgggcaagcttgagaacctccgtcaataacagagttgctttacgtctgagcgagagatccgattcatcctcgatgacgtcggagagaacctgtattcggttaactcttgcgctaagccaggcctaggggtaaaaaaaatacatacctttgggagccctgcctcaaccaaaccggccaatatgagagtagagaaatgagcagtcagatcaaatctgttgctattggtgtcattgagagcgcggctggctcttgatgtttcaaggtcagagcgaagattcgagactctgccataagttgtgagtcttctgcccgcaaggaaagatgacgaccaggacgggggttttattcgcagagcgtcgaataatagctccattatcaagtctcgggctataggatcattgtaatgaagcgaatcaaggagagaacgcaacggttgtgagtcatgtcttgcaagaataaccagtccgggccaagtcttcagcatcgcagaaatggctcgcgctgccgactttaatcgcccactgcgtaatgtgtcggataatgaatccgtgaaaggcgtaagaacagcttcaagttcagacccttgaagaaacttccgactacggggggtgtccacaacatgcagaaaacttgatatcagagactctgaggcgccgaacgtcccctctgcaagcgcgtcgtgcagggcagcaaatccaccggcagaagcaaccagttcggggtctttgaccaacatctcagccacggtcatgattgaaatgttccgaagacggtcttcatgatgttcagcaatagcaacgatggtccgcacaacggcgcgtgatatctctcggacaccgtctttgacatccaggaagcctctcacaaacttcagggcctgttccctctcaatgcttgccttggtttctttgaccagggacaatatcaccagctcgtcggtgtggagtgttcggatgatttgtagggatttgcgatcggcgatagcatagcgtgttagtcgataacccgcagctaccacctctttactgtcacttagaagcataacttgaacgcgtaggccaaaaacagaccacgcgaggtcatacttcaatgtgggatgccgtttgaataattcaaccaagctattggcgcgctcgacatagaaatcaggcgacatcccctctatctccaacgcctgcagcgtttctgagaggacataggttggtgactccacgtcaccatcaccatattcctccctatcaccatttaccgatccgacggcatccttgtttcgtgatggtgagcgcatgggactggctcggaaaaggctcgaaaggcgattgccgcgtggaggagtcgatgccggcgcctgcgcacgtaatatttcttcttccaactcatgctgcaattcgatcagcttgcggttcgatgagctcaattccgactccaccttgagacgctgctctttcgtttgctttggtggttttgctagcagtgcctccagcatattctcggttccgcttttgatcttcatttccttcgcgattctgtctcgaaggaaagcctgtcgctgttcggttgtgtgaaagtctgcctcgccgatcgatctgctcgcacgtctgttatattggtcgtccggccgaggcgtgacactgcgtgaagtggtgcttttgagctccgaactaaagctccctggtccaccgatggagggagctaacgagggcgccaatgatcctccccgtccgcccatgttgctgctccctccagactcggatcgcctgttcctcccgattcgtgagatactgtcctgccagctcccatcggcagagccgccatcctgactgagcgaggatcgtccatcacccagtgcacgatgatgagtcgacgcggagtatgctgagttgtgcccggaagccatagagctccatccagccgtgctggctcgctatcatctatcgcaagtgttctgagtatcggagggctgcattgaggtcgcttgttttagcgggagggtcgagcggagcggagcaagggcagtatggggaagtgtaatggaggggcgcggtcacaggttggttggtgatcaaagggaaatagtggccatttccacctgtcgaagggtgattgaattttaacttgagcacagcagtgatcgtcgaactgctcttgttgtcccactacgagatgctcggctcagccagatctggagaaacaaactgctgactaagggatcttatcgctccagccctggccaacattgcaacaccacgccatgctgaagagctgtgttcctactaaaggggttttcgtctcttgttgagaatggtctgatcattcaattgattttcatttgattatagtagaatctgaagatcgtatattctgataaactacttagtatcccgctctttcttcctaggcttgctcatactgatgaatacctacatgtaggtattttataccgttatcagttcattagttattgggggtagtcttctccaggatggtcttcatcatctcattgccaagagtggcagcttcagggaaacgcggcgcgaagtactccgcaatccgctcaaaccggtgacggtaggactcaaagtcaccgaaagaaacacagtcagaccatgcctgttgatcacatcaagttagcacgaactggagaatgggatattgcgaaagacatacccttgcggcaaacgtgaattccaaatcatccgagcggaaggtgttatcatcaattgcggtatccaatgcctcatccaggagatcctggttacggaacaggtattcggtcacacccaaccagagacggaaaagctgcaggatgttaatataaccgcaatctggcaatatgctctcaatgactgtatacataccggcgtggaacagatcatatgatcgtaagggacaatgccgagtttcgaccagcagtcaacaatagcaagcagactgagatggctgttcggcggcgccttcccgcgcggccgattagacagagagaaccgatccagcacctcgtccttcaacagcagatcttgtccttcggagccaggtctgaagactgacgcacctgcagcctttacccgaagcttgagctcctccctctgtcctccaatcatcagtttgtacaaatctgtgaccgactcggcgtactggcgaatctgctgttttgccgctgggttgaggatcgcgagcccggcatagacgtgccacttattcgagtagatgcgcaaggtgatattgattttgacattctcgataccgcctacccaccgtccatgctcccaggggaactgattgttggcctgccaggcggttcccatgctcaggaaagcagcatgggtgacagcctgcgtatccgcggttatacggtcgtgcatctcaccggtgagatagacatgtttggagccgaacgaggaaaggatcgtctcaacgaatttgaggctttcgtctgaggctctgtgttggatgaagacctaggtcaccgcgttgttaatgcatgtccgagatagaatagaatccaggcttgaggttggtcataccagaggctgaccttgcggattcactttggggccgtgcagcgaatggcaagatacaatctctacatcggggggcaggtgtttctcgaatgcggcgagctctggagctttgcaggacgtttggccaccgacaatggcaccgaccttggttgcttaaatccgagtcagaaagtgattgcgatggaagcagactagcggctctggttcgacacatacataatccgtactgcgccacgaccttgtcgatggctccagcctctacactgtacagaatgtaatcgctaattcttgagacgagatgtccattggggaatatggtgactcctttctatatatacaatgagcttcttgagcttttgggtggcataatcccagaaggggacgtacttgagaagcgaactcttgttttaaagattcaaaattctcaggtctatcacacgcgtttatccttgatatcaaaatgcaacgttagttatgtcaggtctaaaggattagttgtgatgaggctcaatgtgaatctgtaaaatctttttcacttgttagtgaatgttttcaaacaacagcaaagtgaaggtgtatagaatgaggttgaacaggatcagacaaaaaaaattaaggtagcgtgggtgtaacatcaccgacagccagctggttagccatcaaccagaatggtatgacagcgccaaccaaaccgtactcgagccaaatgcactcatgtcatcatttgaggggatgggcaaagaaagacggatgggataggaagcttaccatttgaggcattgggactgcggcgccgaaaaaaaaaaaaagggccatttacctccatcctgcgtcgctcaggcgttgggcatacattttgcccatatcacccataccaatgatgccgatcgaggcatcttctttggtgcgacccatcgcgacaagtgcgcctaaaacgattgaggaataatatgtggcccttagagccggtgaccaagataaccactaaaggttgtttcggaccagttgaggttcaaacttgaaaactgctcgagtctgggaagatcaattgcaatgttagagagaattcagttgggcgaacgaaaaatttaaatactgaccggagccaggaccttcaccgcccaccgggccgactagagatccggatatagatgcatgacacctgaaccctgaggaatccggctcgcttgaaagtacgaaccaatcacaggtcgtaattttccctagggcacacacccacttttttcttcaacatccaagtgggatcagatccgacttttccttcctttctgtattccatccacactaaccaccaaaaacagtcgcaatggcccccaagaccaagacccccgctgccgctaaggagaacgtctccctcggccccctcgccggtgatggtaagttaggaacaaaattcgagttgaagaagttggggaaaaaaacatgagatctaacctatcttcataggcaagctcgttttcggcgttgcccgcatcttcgcctccttcaacgataccttcgttcacgttaccgatctctcgtgagtcgccctccacccgcaattgtcgtattagaaatcgagcgcaattgaaatgaacgtaacacgaaggatgatgttggctgaccaattttgattacagtggtcgcgaaaccatctgccgtgtcaccggtggtatgaaggtcaaggctgatcgtgacgagtcctccccctacgccgccatgttggctgctcaggacgtcgctgtccgctgcaaggagctcggaatcaacgccctccacatcaagatccgtgccactggtggtaacggcaccaagacccccggtcccggtgcccagtctgccctccgtgctcttgcccgctccggcatgcgcatcggtcgcattgaggacgttacccccaccccctccgactctactcgtcgcaagggtggtcgccgtggtcgccgtctgtgagcgtgtgcggcttggtctttccctttcccttgcaagtcattgcattgctggattggaggctatttgcgggcttctcctgcatctgtggatggaataaacgcgaggaacggccttgatcgcctggtcttcaatttttttcatacgctgaaaatcaactctcgggttttgctgttggattaggtagtgctaaatcaataacttgacctatatatcctggattatagcaagctcctaatgagctcagttgtaagatgatagtagttaccctctagatttacgaggcctggtgaaagttcccgtgggacatgtggatgttcagacattagtttattgttgttgtacagatgtgttatgtatcgtcctgctctttaggacttcgtttgcaccttcgtgtatcatcccgcgaagcatctacccattgacgtctgaatttgtgcagtctcaattgtaatctctacaccttataaaggactcttcttctgtccttgctcctcttctttttcttcctccatcaccttttctcttcctcttcctcttcctctatcccctctcttccattgtctatcgtctctctcctcttgtcaagctcctcctttccatcttaggatctttatttaaattataccccttattcacctattatgttcatgttagggtgttggcaaggggattcttttgacccttcgaacctttttgtgtgatatttggcattgtttttgccgggaagttcccaagtatacctcctcttctctcggtaatggacaaagccatttgacttggtcgcgtacttttagcgtgcctgtctgcattcttttttgagtgagaaatctgatcacagttaagcttattgtgcatcaaccaccatgccaaaggtgcacgaccaagtcaaacggccctgtctcctaccgagagaagaggaggtatacttgggaattttatgattaacacaatgccaaatgtcacggaaagaggatccttgttgattcttaccttttcttagaatttgttgcttgtattaatagctatgtggtaattctataatgttctaatttctagatgatataattgctttgcttcgctccgcaataaagtaaagacctcgggaagatccaaaaaagatcgcctcccgataacagatagaactgcgtttatccgacagctcaaagtacgcaatcggttccaacctctcctcacagctccaactttccctcaaagcttcaactttgtgcgcaatctccaacacaaaacgggtgcaatgtccacccaccaccccaccccaacaatcctcctcccaggccttcctccaaaaaccctcgtcggcatcgacctcataaccttcacatcaacccccaacttccacggaatccgtgacctttccccgggatggcacttcctctacaccggcgcaacagagaccctctctttgcgcagcggcgcatggttctacattggtgacatcacgactgcagggaaaggcagtaacgacacagcgctagtcgcgcaaggccacaaaaatcaaacccaaaacgcatcagagccagagatttacatctggaaatggagcgtgaatacagagtctttggtagcgctagatggtgagagcgcctcatctctccaagagagcatgcgctacaaagcgaatctgggttcggtctggcagagtggaggacttttcaaatatcgcagccggattgcgccctcaatgcttgtcaaacccgtgacagaatcagacactggcgaaaagaacgagcaagaccaacccgaacaccaaatcgaagctcgtatccagaccgaagatgattcgcaaacagaagagagcgggcggagggattggtctggactaaccgaccgcatctcaccgagccttttatcacgcgttatcggcaaaccggaggttgatgtggacgggcatccgcgatgggcgttgtcgtctgcttcaacggccaactgtgacgcggatcatatccctggcgtcgattcgccagctgaagggtcgcacgagccagaaccggaacgagaattcggcttcattcccgttgatttgaagcggacgtggagagaaggcgctgtcggacgcgaaaggacggaagctgcgaaggatcggtcttgggctctgggagacttgatcgatcggtatgctggggaggcttctgggggaaatcagttgcttggagaactgcagtttacgttcctcatggtgctgactatgatgaactactcgtgtttgcagcagtggaaacggcttcttgagctgattcttacgtcccggggtgcaatcttggatagagaggcgtttatgagtgaagttcttcggatattgtcgttgcagctgcaacgatgcgacgatgttgatggtggactatttgagattgatggtgatgaaggcggggctttcttgcgagatctactcatgaagctgcgtcagtcagtcgatgacctcgttggtgacagtggatccgaggtcaagttagagcttgacaagcttgaagagtgggtgagggcagaatataactgggagctgcgtcgtggcactgtcgttcgccacggtatgctccaattggaggacggcgagcaggtcgaaatggactgggatgggaatgacgaggatgacgagactggagagtatgctccggtaattgttgatatgtgaaatgcgagaataggacatcgaattggttctatctctgcgcactcatgagatgtgtaaagtaattgacgatttccttttggtatctagcttgggtgcatttactggcgtcttgttacattttacaataaccaaatgacaagcattgaatgaaacaacggcatctatgaatgaggtctaaaatctctatatacagttcaaccctagcatcaaagataccaaccacgatgctaagcttcatagacctgcataagcggcgtcaatcaaacagcttgcgagtctaaatctaaaatcatctatgaacgctttatttatctattgtccctcgttctcgatggtgtaagcccattcatgttcttccttgccgaacataatggcctcgagccacgacttgatctgcgcggcatacccagcaggttcgccattggcgcccagggtgttgatatcagtgtcctcgttgtggatcaaggcaacaggggtaatgaagtactgaaggacgtgacgttagcatatcagctccaacaaaagaaaatagacaattcttcaacttacagcagtgccagaaacaaacgcctcaacaattcggccctccttggaagccttctcaatatcatcaatagtcaaagtgcgctccacagcctcaagcggcgcaagctttccgacaaagttctgcgacaaacgctcgcgcacgagctccagaacactgcgacgggtaataccgggcagaatgagctgattgtcaagaggagcagtaacaagctccagcttgccttcggtgttgtgccagacaatgaagaagttactggcaccagcctcggtgacctggcggtccggcccgaacaaccacaggatctgatcgtagcccagagcctgggccttgccgtgggcctgcaaagaaggaccgtagttcgcacccagcttggcatagccgaagccgccgggccaggcacggatggtatcaggggaagaggcgtagagtctaaggcccttgggggtctcggcttggggatccttcttcattttggtcatgtcgggccaggggacagcaataatgaagaggagggcttccttgggcacttggacgcccaggtgaggaccgtttccgatgactgttggacggatgtagaggtaagaaccggggttggggagccagcctagagacaattatcagtggatcgctctcatttgtattgtaggcaaggatagcctggagatatagtgatattggaacatacgagggccgtcgatctgcagtagcttggcgacaagcttcttcacctcatcgtacttgaatccgggcagcgaggaccgctgcgaactggtgttcaggcgtgcgccattgcaatcggggcggaacaggcgcagctttccgtcgtatccgcggtacgccttcatgccttcgaaacattcggtggcatagtgtaggaccgaggctgtgggtgggatgctgaggttctggtagggcttgacctcgggggtctcccatcccttggctgcggtccatttcacggtgaccatgtggtcggtgcagtgagagtggctcagctcctctggggagccgggcaaaggcaaatcgcggaggttggttgagcgagtgatattgaagttggaggcatccagctcagcgacattaggagcgacagaacccatggtgagatgattgtggtatgatcagggctcttttttggatgtggaggaggagaggttctatgagtcaccagacggtcaatggatgatctgaaaggaaaacaaaactggcggaaatgaagctaccttttgaaatatgtcttgcacaaaagaaacaaaagcggtttgccccggagaacccatggaatgcccctcccaaaccgttttcgatccaaaaaaaagttttcaacgccgaacggttcgcctctctctatttgccaccagaaacattctacattgcacactgttatatatacgctgtgtgttgaaggattgatctctctgaaactatgttgaataacttccaactcctggaacggtctttccctctactatgagcattctatgaggggtcaaatatttgctatcttcaggcccactttcggcatctccgaggctagccgcgttgatattcactcacaattgtagtcttcatgttcttatgacagtctcgttcatattaactagtccgatcgtactggtttatggaattacattgaaagtcttggctctgtagtctgcatgatccttgcatgctttataccctcaagctttgctcggggtaatatgtaagaagcatgttgccttctagaatacatcaatgtgtagtactccgtatatccaattgaattgatcaagcatggcaaaacaaggcctcgaacaccctcaaggaaatgatggtgtactttgtaccccagtctacaccaatcataatagctgaatgatatttccggctatcgtatgaccatcttgaaactcgatcaactaatgaactatcacaacacctaaatgctatctaattgggttaattgggtcaattgggttcatggagcttgataaagctgattttgggtgatatatatatcacacagcacattgaataccatcaacctttctatatattatatacaacacaacacaacacaacatgtatatgtatttgtatctagtccaaaacacaaataggttattgcgaccttatccccttcctcgtttattttctagctccatcttaacaatgtatcctgtacattaaactctattcaccatggccacaccttggcggttatattctgcatgtctccaagagaaaacaaggcaatccaggctttcattcacaattactctttaaattcctccctacaacaagtggtaaggtctcagagttccagcctcattccaacccggagaaactcctaccctagaggcccattccttgacattggttgggtcggagaaggtctccgtgccattcaacgaccaacgacaaaagcttgggtatgatacataatgcacctcggaagtgatatctgcagccacccaggtgccatcctgttatccacggtggtctgatggcaacgttgctagacgggacttttggatagtgttgcttcccctcgtattcccaagcgagtcagagccatggccaccatgactatcgattattggaatctggactagcacattcttagcttatcatgaagtcagaaggcagaggccatcaagatggagggtcgaaaggcttgaattgacggtcgtcttgagcctggaagatatcgacacggtaattgccgaggctaaggcgatgtcatatagaaccgaatcgagcctctataaacttgcaatcacatgccgggtgttgatgaatgtggaatgtgaaatttgagctgactcttttcaggacacggtcgagtgtatattgccctatcagaatgcaatttatagacactcgggctcagcgcagtggatagaaacatgttctgggtacttaacttagtcattcctctgagttattcagaaacctttcggtgtttagtcgatatgtgattcgacttgggatttgaaagatagatatttcgttatattgaagagcccacagacatggcattgatcacctgggcaagaacgacgggttagaaatcatctaaaacgtgtggaaacaactggcttacttctttattgtataatatataagttcctactgtcaataataacgaaggaagaagagagaagaagcagacatccatctgaaaatgctattgtaggaacaaacaagatggggattcgtagtatggatgtaaaatgagtaatgcataaaggaagaactatcacgcatgtgacattatttgaggacatagatatcctcgttctattctatggatacatctattgtaatcgttcttacccggaaggtcagatagctattgaccctatagcttttgaccctaccacgaataatcccatgacgactacattatgtctcggagaccgacatactatccttgacagagcgtaaaaacaagaataaatgacatgaatcatggctacatgaataatagttcgccaaggagacgggcggccgatcggtttgagaaaaaaaaccaaaacgtaagtgatgatgggggaatttggctcattatcgaggcgtacacaataaagaagaaatgcatctgtaagggtcctcgataagggcgagactactccgtactgtcgggcggttggtcggcagttatgaccgccacgaggtctatacaatatagaaggactaaggcgtgatcagacgctgctgccttactatatgacagatctcaagccaataatgcagactggatacggacatgtgcataagctgaagcatcgcttgctgatatctgacgattgaatacaggactaggctaaaatctcggggtttgtcacagaaatcaagacctaagaccgggctcagtaatatgacgtatatgattagctgcgaactattatttctggctgatcttagcctaaagagcatgagtggtgagagaaaaagaaaggaaaagagcgaacatggcttgcgtatgttatacggagtccggaagtagaatggcaggtgtcagaaaatcaatccacccgccgtgatatgcaagagccgagtttattgggactgcaaaagcaaagatgcgaaaaaaaaaaccttggcgacgaaaaaattggatatgtgaggatcaaattactccgtataccccgctgcatctgcaatgcattcacgggccgtggattctctgaaagtgaaaaaaagaaggggtctttaactactccgtaatagaaagaaagctaaatgatgtgtctatcactatttatatcggagcagattatagtaaggactccgtacgtcccaacaactattcagactcagccacagtaacatctacacaagaacagatataataaacctaaaaagcgggggcaaaggtggtgatcgctaacggtgaaaacatccgaccaaccaaagaaacatggttgctttttccgaaccactgatgagaagtaaaatgacctccagcctcactttgtatatagaaatagacaaatatacttcgtatcctcggcacatcgaggtaggggaagggaacagacccaatcgaagagagataagcacatgcaattccgattcaaaagtggtctggtccagaatattcaaatcggaactaccgagcatatcagccaaaactataggataaccgcgttttcttgtcccgcttcacgctacttctgcttttggcaggagtcttctcctatagaaaggcgcgggggctttcatcacacatgcaggtgatagagattcgtaactcacgttacattgcaggcaatttggaccttcgtgtactgtacttttggttgcaggggtccgaggaaaaggtttgttgggaatctcgatgcccaagaaacacgggaaagaagagggggatctcagccgcatagcagatctcactggctcgtgatcccggatctaaacagggctggaacttgtcgtgcggagcgaggcacatatatcgtgttatactttctaataacctcaagcaatacgatgtagagcatcggagccggcgttatctcttcaaatttcagtttatcaggcgcgtaagcggcagtacgcgacgctagcatgtgtagttcattttcatttttccttttttttggtacaaaagaaaataatttattattctccgcggagcccactgggatggggctagtttggaacggcccgagaatctacttgaacagctagcgccggactaatatactcactcctgttgggaaaagtattccatatagtatcagtgctccgtagtggggctccttgtatacacaatctacaacataatacgatgtagatgtatagagtacaatctagatattccaactcggaaaatttgcctagctaccctctctacgtggctgacaccatccccagcgcagcaatgcagtgttgccgtgagaatgccaactaggccagtttctcgatgaaagtgacagaatgccaagaaagaaatgtgttttgtctatgattccgattggctgttattttaaccgccaatgaaaaccgctggaagaagttatgtgggatgtatcgagtaaagtgtcgaccaaagtgatcaaaatggccaaggggggattgtcaagagcaagaaagcaaattatagggattggatcatgacaagatccaagtatcgagatagccaaattataattaaaacaacatcgaaggggataggatgttcaagatgttccccctgcaaatcccgattcgatccacagcgagaaaaaaaaaaagactttaagacgggacaaggttctaagattgtattaccggagaacggagtaggcgtagtacattcatgaatacgatgtacgatcttggtacatagtaagtccacttcatcacctaggaactccgcatcacagcgtgtagcagcacatctcgtggtcgtcccatcaaccggtgtgttggaattttcacctccttcgtgcgaaccctgcctgttggaacatttttccaggcattcgcccgggttgaaatcacaattccatcttggagcgaaggccgcaggtgtcagcctggctggttagtagaccgggtgatatccacaaatgcttacccggatacagttttcctaatgtcttcccaattagtccatgaagaaagtggctgaaagtggaggttatggagtccggtatatggaattgatatatgagctttgtagttagttgaagttagttatagttataggaaaacaaatccggcgtcagtgtcccaaacccggcagtatgacggggccggcatatctggataatccgatcccagtcttttgccaagtgagagaattagaaagacaatcaggggtagtagaatcatatgttcagaggaaacgccatagaacaagcttgacaatgagctccaacaaggcatgtattccgagagggcatcaaaatacgcacatcgcagagatcgcgtaccgacgccccagagtctcctttggtactccgtctccgtactgatacatccctggaggtggttttttttctctctcattttttcccgtccgtttttctgtctttcttttttcttttttctttgtcgttttttgattcgcccttgatttttgggggggatttagtatctcgtgctttgattcaggctggcccgaaggctttccatattcgatctgccgaatctcttgacagtatctcccaggcctcgactcgatggcccctccgccatctgcatatcatcggcttatattggcaagttgatgaatttgttcgctctccaatcacagctgaattcgagcttggactaccgggttaccccggttgtatgacgggcgtcgaacctccccttctgtttgctaaacgcccccctcgcttttgggatcttgtcacctgcaggtgaaatttggatcagaccgattccagaatagtttcttttagttgtgtcccaccttcacgcgtaaataacgcaccgcaccgtgacgcccgtatcattgcgacatgacacttaccccctttctgacatccagttggtgagacgttggagacgtcgatttcgatggcctataagaggaagcgctaggaccctggtttagcgctatatagagagttgtttgcctgcactttttgcaaaatcactcactatttgtcaacatttccgccttgctcaagattcaaccacggtatatttcggccataaatctcgaggcacagccttttggaaatcatactcccaatggctggtcttttgaagatgaagatgaagatgagccatcacgacaacaaaccatttccggcgttggctccaggtccgccgcgcctgttcgctccgcagacgtcgactgctgtcagtaggccaaagaagaattctacggcttgcctggcatgcaaagcagcaaagaggaaggcaagtcgttgcatcagtgaaccgtgaacccctgaattcccccctctttctccctctctctctgtgggttgtcacaaatcttggaacaaaacggctaattttctggttctgcctgatacagtgctcggggccagatgccccatgtaaagcttgtcggtccacaaacaccgaatgtcacttcgatccaagccgagacctcagacgaaaggttgccgtgaagcggacgatccaggagctcaccaaccacaaatatctcctagagtctttgctaagcacactcgggtcggctgaccaaccccagtttgacaaagtgatggatttgatccggaagaaggcttcgttccaggatatcgcccatgcggtcggaagccccgtcacgacattcggagacacccaagatttgtcgactgccagcagattgccaatcttagagtatggggggcatgccgtagaaacttcaggcaacgcggtgagacgaccatcagaccctggcaatataacaagctcaccagaagagcctccaagcatgaaacctccgcagtgggcaacagttagcccttatgctcgtatcacactagagagcctctgcgacatacctctcttcgaggtgtcggcaaagccgtggacaagtgtcacagatgatgattttctggtctcgcaactagtctcgctctactttacctgggaccacccatgctcgcagttccttgatcaacgtatcttcctcgaaagtatgaaattcgggaatcgaggatcagtcttctgcacgccccttctcgtcaatagtttattgtcaatcgccagcgtatggattccggaaatttaccacgctacgaaacaattcgctaacctcgataggcctattctgatagccctgatgttctttccacccccgagaacatgttctcgcggggtcagaaatttttccaggaggcacaaagattgtgggaggttgaagacgatgaccacgacctgcctaatatccaggcgctcctcatgatgtgctgtgtgtatgtttccctggtcttagaaaataagtcgtattcatgagattgatttctttgcagatttaaatcccaaggacgaatcaagaaaagctggacgatgcttagtcaagcagctcagctggcacgggatataggactttttgatactccaacagtgtcgggaaatgacatgtcgtcagagatggaacggattcgcacaatcactgcgtggggtgtcttcaacgtgagcttgtaagcgctgcctaccatcgtaagaacgaataatgtccaactaattggcgcagacaaatgtcgattgagctgcagaagattgttcccttagcatatcccacgtgcggggtcaagttgtgtggcgatgaagactttggctggataccgtatcctcgctcaaacaaaatcacatttgacaaaaagccagcccatctccctcaagtgaggaaaggattagctgagatcaccatgatcttagtcgatattcagaagctcatttctgaaaaacgtcggggcaccagctttaatgagctgtggataaatgctaatgacccattcgaccgtttgactgattggctgagacgttggccgagtgtgtctgctatacaacgagatccgatcccacaggtccttctcttgcggtaagaatgactaccttcctgttccgtgtaccccagtgactgttgtatgctgatactgcgtgaagaatcaaatgtctccaggccatcatatacctgtttgaggttttcaatgacccccgtgagccacaatttgcccaacaggtccagttctatcaggctaggtccgccgagcaaacggcgcattgtcttcgcatccatcgccagtcgtatggcctcagacatatacccatccaggtagtcgatgccgtacagacaggccttcggatcttagtccatcaattggaaagaagtgacgaatcgaggcaggcgtttactgagctttgtcggtttggaatggctctgagccacaggtttaagcaaacagccgacgtgatccatgagatcaggaggaatgtgcagcatcgaagtatccgattaccacctgatgttgttgtattgttcgatcacccggaacggtggaggagtctcgagccctgaaagttagcatgacacctgtgcttgtgaatgtatgaatgcatctatttcgctaccccatgaatgatattgaaagaaatttcaccctactgcagattcgtgtgaagcaaagatggaatgtgaagtggatgtatcacgacggcaggaccggaacgaaggtgatggggaaaatctgcaacatcctagaaaactgtcacggcagagtaaacattgagactggcctactcactctttcataatggccagtactctgccttcctcgcaagcagatcggagacaaggacgtgcagtgtcaccgtctgtggtttgaggcaaaacaagggggtcaaacaacaacgttaactgaggggaaggggctgtcattcgcagaggcctgttagccgattacaggcggccagttgctgacctctgatccaccggaagtcttttccctgcacatttcacactcaaattactcaatgaaatcacacgcttgagaaatattgaatttctctagtgctggacttcccaaaattcctctagaaagtacaaaaatgggtacttacttgaactgacttggtaacgtgctaaagccaaccgtcttctgtctgctgagatacagttaggccctgttacgcccatcttttatatttggaattaccctacactttggtcagatggaaataggtagatacatctagatagtttaagtatttacaccgagtacaccaagtcagtcttaaagcaagcattcgaaagagagagcatatacacgatcacttttcaaaggttatagtacagagaaaagtcgcgtttagaactcaagtctctttatggccttttcctgcggtctacgtaaaaatattaagaaagggcggaaggtctttatacaacaaaacatctagaaagactacgatcgaaccaactggatcgtatcgttctcgacagaacgcggccgacttagtcttgtatatcaagatgtggaacagccagaaagagtatcaagtctgttgagaatgtccagagcccctttcaccatcaacttgtacacttcaggacgtttactcctttattctacctattaaatctctacttacctaggcacttggtatctaggttgttgcaaagctatagtgaactatatttgagatggaagtatacagtacatgtattcccagccaaaacaggtgacagtctcagtaccctgtacttatcctggccttagtgcatcaggcacaaaatctacacagctgagtcatcttgatgcttatgcccagataagataagcacaaacacccaagcgaaaaccctcaaaattcgacttctttggcaaatcgcacacgccgacgctattcttcccagccaaaacaggtgacagtctcagtaccctgtacttatcctggccttagtgcatcaggcacaaaatctacacagctgagtcatcttgatgcttatgcccagataagataagcacaaacacccaagcgaaaaccctcaaaattcgacttctttggcaaatcgcccacgccgacgctattccccccccccctccccacctcgccccttccgcttcctcactgccgtttcatctcggcatcttgctgcatttttaactcttttcttctccccctcccactcaacatgtcctacgacgaccgcgccaatgcgcgccccaacttgaacgatgagtccgataatgaggaggaggctatggtcaacgactaccgcgagcaggtcaacttcgacgatggaatgagcgagctggaccagaccatgtcccacggtggagggcaggctcaagaccttcaggcccaactggccgccgccgccactccgttggaataccaggctactcttgagaccaaattcgccagctacgacaactactgcagtctgttccattatatcctgaactccgatggccccgtggatttggaggttcctaatgtaggtattccgttttgccgaccgattgttgaacgccatgaatgaaaagtaaaagcttggcattcgtgaaatcaacaagtcgattcatccctccaaaagacaatacggataactaacaatgcttttctacaatcagtactactgggcttgggaagtcattgatgagttcatttaccaattcgagtccttctgccgttaccgcaaccgcgttgctcgcactggatccaacgaggaggagagccagctgctccgcgagaacccgaacacatggggctgctactcagtgctgaacgtgctttactctctcattcagcgctcgcagatcagcgaacaattgaacgccactaagcgcggagaggacccaatggctgtcgccggcgagtacggctcccgccccttgtacaagatgctcggctacttctcgatcatcggactgctgcgcgtgcactgcctgctcggcgacttcagtcttgccctgaagatcctcgacgatgtcgagatgaacaagaaggccatgttcgcccgcgtgatggccgcccacttcaccacctactactacgtgggcttctcctacatgatgatgcgccgctacggcgacgccatccgcatgttcagccacatcctcgtgtatgtgtcccggacaaagaacttccagaagggcggcaacaactacgaagccatcgccaagaagaacgaccagatgtacgccctgatcgctatctgtgtggctctccaccccacccgtctggatgacaccatccactcggccgtccgcgagaagtacggcgagcagttttaccgtatgcagaagggtggccccgaggccctgcccgtctttgaggagctcttccgctcttcctgccctaagttcatcaaccctactcctcccgacttcgacaaccccgcctccaacgtcgaccccgtcgaccaccacaccgccatcttcatggatgaggtcaagaacaccctgttcaaccccaccatccgctcttacctaaagctctacactaccatggacctcaagaaacttgcaggtttcctcgaggtgtcccccgagcagctccgctcgtggctgctcgttaacaagcagcgcagccgccagatccgctgggtcgacggtggccttctggatggcgagcctgccatcgccaacgatctcgactacgctcttgaggacgacctgatccatgtcagcgagaccaaggctggccgtcgtctggtcgactggtacctgcgtaacctcgctcgtgtctactaagcggggccagtgtctcattagtgtgccgagagttgaaaacaaaaaaaagcgaagagtggtgggagccttctgcttacaagaagaggaacggacatgacttgagatgaattttctttctttttctctgcctactttgttttttattttccatattatactcattgctctcccccttccccctcacgtttcttctgttgttttcctttttttttatttttcgagagtcccccgtccatggatcatggaagttcaaggcttcctggtccgttcaaaatcaacttcgagtttgattatcgcgatttccttggtgggcgtccgctgtttcatgtgtcaccctggtctgctgtcgctgcttctttgaaggcagatggttaacacagcatggagagtatttgtgtcaggtagaagaaaaacagttacttgatgaaagtattagatgaccgagaaatacttacatatttcaaatatttcatggtcactgtgcttaaacgattgctctgtgaatagtattttggatgtggatgagaaaaacaaaacctagaaacttcaaattcaatgaaaatatttcataattactaggcgcaggccgcatgataaacgtcttctatctacatgtacaagtacacccctctctgaactgaattataacaataatagctcgcctgtagcagccccaccagccagttgcggctgatacacctgctgctggttctgggtcacaacgtactgtgactgaggcgcacctccaccaccggtaccatcaaggtccagcgaagccatttgctgggagccgataccactgaagtaagcgtctgctgcatctgctgcttcgttcatgttgctagggcctgtagttgcggcgttgatgccagggccgacagggagagatggaggaggaccattgtacattggcgtgacggggtcgcctgtggtgataattgtggctagaccactattactggttgatgtggcagccatgtttgcggagggagggttgtattcgagcatattacctgtaccgtcatccacttcggaacgttgcaaggctgggctgggcataagacgccgaggccgggcagcgcggaagacttggtggataggcttaaggtagacggtggctagagtgccgacattcagacacagttcctcgagagtgcgtgggtctagcttttcgctctcggccgtgattgggggcttttgacccatgacaacctgcttggccattgctgggtctgtcgacagcaagcgccagtacatgtaaccgcggtcacgaagatcagggtcgtctgtttcttcggtgcaccatttcagcacttgtggtacgagctgctggcccttggtggggcgttggatgaaaagtttgacggtagcggtgagcagggccagctgcacttcgaccgtttcgtcgtggaatgtggccaagtagtcctgaaggaggccatccgagttatctatgcggtccgcatactggccaatgatccaaatgacagcggccttggcctcaggctcatccagatcgtcgatatttcggataacatgactgattatactttcgtactgattggggtatttgcggaagatgttgcgaatcactactgttgcctcttgaacgatgtatgggatcttggcatcgaccagctccaagagcgtttcgatacactgctttgcagcagattcaatcttgatggccagtttgccaatggcccggacggccttgcgcacaaagtgaacgtcaatttcagtggcatatctgcgaagtatatcagtacacgtttgatacggtcaatctgagaagttcctactctcggagctctgccaacacaacggagatgttctcttttgtggtcagcatgaacattaattccagcttggtgactttgacgtagattggatcgttgtaattgcagaaaaacactcggatgtcattccgtaagacctccggtctcttctgaagaattaagatagcattgcgcagagccagatattggacctcaggcggcttggagagcaatgtgacgagtggtggagataacttcttgcataacgaggtgatatgcttctcgcctggaatgtagttcatgagataaagaatgacacggcatgaggttagaacgacagcagaatttgaatgcgatagtcgcggggcgactcgctctgccaacagaagcgcctctgcggaatcctggggcacgtacgccattaatgcctcgaggatgtaagtttgaccccatctatttgaactgttaacacgatgtccctagatatggagccgaagatgcttactcggagcagtctgccaggattgaaaccaatttcgaggcactaacatagtcgatggtgagtgaaatcgattcactgcggccccagatgtccaccaatgaggctaagacgctggaaacaacagtcgggttctcatccttcaacatgcggttgagcctgtcgattagatctgagttctcaaccatctttttatcgtgctcatagagctttgcaacgcagaaagcagccgtcttgcggacgtatgggtcgttgtcttgcattaggcgtttgacaggttggaacgtcgcttcgacaaattcgcgaacatgcacatatgagatggttcgcagtgcaagcgcgcggacaagtgggttgttatctgccatatcctataaagcaagtcagattaatttgaatattctctcgtgacagcggggccatacatcaatcaatataggtagagccttcaatgcaacctctggtttcattctcgaataattgaccaggaacaagaagcacctagacaatgtattagcaagcgaccttcattccgtatggcaggccataagcatcattacatcttcttgatctctaaactcggcagattcatacaaccaattatatccggaaatagcgcaaccatgtcgttgttgctcatggtcatattggcgacaatcttcttaagtgcgatctttttggcggaatagttcttgtcttttttgccgccgctattgagctcttgccgtagctctgcaaccttcccctgtgtattgcgcacgcgtaagccatggaattgaggatagggagcaatacccatgaacatgagggcagatataatatggttatttggagtgatgtagggtaaagcaaatcgcctatgccaaatgcaagggaatcgagtaagatgcagaaggcctgagtacaaagctcaccaaagcgaggggaagtgaatacatggaagtagactgcggggaagggaggaatggccatgatacgatgtgggagaaatcgtgcaatcaaagaacaggttgggcgagctaacgtaccctagcgaataacttcgcatctcctccagaactcatggctgcggtatgggcgaatagcgattaagcactgcaaggcgcaatttgttggaatgcgaacttcggcaagctctcgtatctgacaaccgtgcgatcaatcacagtcgagattggctgggggatcttcaaggataagaaagtaagacgcgaaatcgagtccaaagggtccgggccgttcggggagcttcgagagaggaaaagggtgagatcgagggcgtgttcacttatggcgcatgcgggatactcggagacaaattaaatcagcgattggacattgtcctttcttaaacaatagatcggaaaagaattaggagaagtgggaaataaagagagagaggaagagggaaaggagaattgaaggcggcgtagccactaagggaacctccctactcgggcaactttcaacctcccccgtcattcgattctcccaagatcatctcccccccacaccacatctactatcttaattatgtcacaagctcgtctaccacctcctcctcctccgcaatgggtagtttcgttgaactccccgatgccgcgcccctcaaaggccgcatccagcatcccagacccgccaggcttctcgagcagtcggggaggcaaacaggtgagttctaccacaaatcatgacaaatggtcgtgaagatactaatgcggttttcagcgccagcaacaacagcaacaatctatcacgaagagacccgacgagaccgacgcgcttaagatgaagaaagcgtgggagatcgccatcgcgccatccaagcagatcccaatgaatgccattatgatgtacatgtccggcaacagtcttcagatattcagcattatgatggtcctcatgttgtttaagggtcccattcagggtctgataggtattaatgcggcgttcgccaagtacgaaaccccgtcgacacattcgcgtctgcttggagtgaaggtggtctacattttgatgcagttggcattactgtgcttgggtatctggaaggttaatgcgatgggactattgccgtaagtcttgctctccagatttgacgcttatttgctaacatgtgtccagtactacgagatcggattggttagcgtgggagtcggaacggcagcctttggagcgggctcattttgctttcaggtgatgcgataagcttggagtacggattaagtgttgaaagaggttaatggaaatgcatccatggaagataatgcgatttggaacaacagctcatcatgacagtgatcatgttggtctaatgccttgtattattgattaaaaagttccataatcatgcatttcttgggcgcaagtttctaaaggggtatcggtatgaaagatgtagtttcctgatggtcatcgggtcgcggaataacccttggtcacttctgacttcttgagcattcccatccacggttttcttggctgcctctttcagacgacgctcttcacgccaatccggccctttctgaatcacgattaatagcagcggtgtcgtggccatcatcaccaacgcgatgaatgtgaaacaccagccccggcccatggcagagagcataggatcgatgagtgccgtcgcgccagctcccagtaagcaacgcccgaaattattggctgcagtggccttggctgcttgtgttggatataggtctaccaggagtgtactgatggtattgaaagcccctgtcaatgtcaatcccatgaggaatagaatacacgttggcgcagcgagatgaattccaaagttcaaaaaccacccaaacacaaggacggatatgcttcctaacgtgagaagagggaatgcgagctgaagacgagctttttcaataggaaagtttcgcaagtcagtttcgcggttcttggttagcgggaagttcaattgctttgcaagacggcggtagttgaaatccaagaatttgccattgataacagaagcaatggtcgcaccaaggccaaacggaatatagcagagaccaatttggaggtcgtctagcccatagagctcattgaagatagcaggaatgcttgcgctcacgtcgtagaatccagcaaaaagaatagcattgcagaagaggatgagactggtatccttctggaatacaatggcaagcgtctggaagggattgggaaacttgagtttctgtttggatacaattgcggtagatatgacgccttcacgagcctttcgggagtccaggtagctgatcagggacatattccatttctgaggaggcaacgagccatcaccgacaataccacgagcagtttccgggaagaaaatcagaaatggaaccatgaaagccgctgcaaaaatggtcagaaaccagaagatcgcccgccagcccaaatattgagacaaaagacctccaattactggaccgacagagggacccatgagagatcctgcggtgacgaatcccatgtaggaaccccgttgtgatgcagtggctacatcggcgaccacccccgacgagagcgcgatggtggtgctgctccctgcactttgcaagcaccggagaacaaaaagagctgcataattgttttgtagggcaagtccaatatttgctgcgatatagatggtgaagcacacgatatatgctggtcgtcggccagctttatccgcaaagtcaccaatgaacatgggcgacagcccttggaagatctgcattcacgttagtcaagccaaaaaggagatggtcctgtacacataagaaggcgtaccatataactcgtcaaagtcaaattgatcaacgaatttgatacatgcaggtctttcgccaaggtattcaacgcgggaaagtagatctgagaagagacaggggagaagaacccagcccaagaggccataaagacaatatacctgcgctgactgactgtgaagaccgagtagtcgacatcagcaagatccccgcttctcgttcccgcatcttcaccagattccggttgcgaaacagatggttgttttatttccttctccatctagggcgtcaatttcaagaccaaatacgtgagtaagagggccttggggacgcagagaaacctgcaacccccgttttttctcgctagctcgtaagcggaaaggatgcatatcgccatttgcggagataacggcccaaaaagacgtgccgagaagccgaagatgctaaatatacggttgatcactactctttacaaactacagcatctgcctagatataattatctagtccagactgtgaggaagggttcaaaataacggtctgatgaacttgatttccccatagttgaatctaaatatatgcagtcaaaacaatacgatagtacagaacagaacaacagtcaacgcgctttgacggcttctttgcatgcctgcaagaagatctgactgaactgccacacttccgtgtaagtgttatacaagggtgcaggagcgacacgaacaacgtccggttttctttcgtcaataacaaccccgttctcctccaaacaatgcagaacatgatctaacaatccgggctggagacgtagactaagctgagcacctcgctcggctggatttgatggtgtgatgagggtgaatggtttatcttccgaggccgcatctataggatacctcatcagaagatgttctagatatcccgtgaggttgatggatttctgtcgaatttccttcattgttgcccgtttgaagatttcgagagatgcgatgaccgcgttgatgtctaaaacagagggattcgacagctggaatccagcggcaccaggctgtggcagaaattctgtagtcgttagtctcgctcatttataatcagaatcagatcacgcactgttctccatgttgaaacgcgttttaatatctccaccccaccagcccgagagtcgaggccggaatgtctcgtcgctttcgggctgtttctcatctacagaaccgtggcgttcatggacaaatagtcctgctataccacccggtccgctgttgagatacttgtaattgcaccaggccgcaaaatccacgttccaatcgtgaagttgcaaatccacattgccggcggcatgagcacagtcccagccgatcaagatgcctttagagtgggcgtgagccgtgatccgttcaatatcgaagtactgccctgtatagaactgaatagccgagaggacgagtgcggtgctggaagcgttatcatcgatcactttcatgatttgttccgtggtcaaggtaggctgatctagatccttgggttcgatcaaaaccatgccgtccttcggatcgaagttatgatggcggagctgagattcaaccgcatactgaattgcactcaggttagcaccaacaacaaaatcgacaattaaaatgaaaaatcgagaacatacctggtcactgggaaaagccttgccctccagtataattttatatttctctttggtcgggcgatagaagcttgccattagcaggtgcaaattggcagtcaaggtgcccataactgccacttcactttggaaggcaccgacaactgaggccataagcttggatgctgcagtgtcaacatcgacaaacggaggtagcaattgatcatcatgcggcacaaagtgcccggtcacgcctttcgttgcccaagttcgcaagtactgctcgatatatttctgggtgctacgaggttgaactcccagtgagttaccacaaaagtagatgcatttttcatcagacgcttcattgcctaatgagaagatgataaagtcaaatgttagaacggacgccgcctgggtacacaagagatcctgatacgcactttcatctactgccagggtcttccgcttgagatcattcttggacggaatgataaactcatctcggaagctccgaagcggatcttgagcatcaagagcttcggcatactccttcttgtaggctctgatatcatctgcatagggaagcggggagccggttttgatgtcccgaacatgctgctgggaacccattatgacagacctaggtccagatagttcctagaatgcgtgtgtatgtttcacaaagccaagagctcgagtcgatcggagcttcagcagagtcatacagtcttcccccaccaccatctgccgatcccttccatatatggagattattctgccttgatttaccgactctatcagaccaatggcgtcactgctaaactgactaacccgatgtaatcggaatggggatgatttgatatcaagtgttcttcatctctctggtttatcttcttggaatatcttattccttcatacatcagccatgtcacgccctttattctcatcgacagccgtccggcggttatcccaagcacagacgtgtcggctcttctcgacttcccgaccggctttgcgcctctccgcattccccggcggcgaagtcgttcctcgccggccaagaactgtcgcaagtagcgcgtctcctctcaaacgctcagttgctcaaccctcgaactcccgctatatccgtcagccacatgcgtgtttttcctcgtcgtccatccgtccggcgaccaaggtgacgcagaacccgagaaccggagatgatggacaatcgctcatgattggcatttcgccacgggccatggaggtgagttgacaatggatttaatttcttttctttctgtttgtctacttttgcttcgatcttctacctggcctgtgttgggacggacatgggaagctctccaaactgcatggaatcaagtgctggggctctgtctcgatgttggcttgctttcagccgacatgggaagaccctatgaccgcgccttgggtccttcagatgctctttcaagcacatgcgaccatagggtgtggaaaacagggcttcccgtccgctcagccgtacttaagccacacgccggtgagttagtagttgggtgggtgaccaccagcgaatcctcactgttgcatgttcttttttttttttttttgttcttagcttctccttcttttggggggttttctatttattttctatttttgtgaatcaccgagctaacccagcgcagcgtctccgcgagatcacagacccaaccacctccccctctgctattaaggaagagaatccataccaccatcttcgcatcacagttaccagtggtggatgccatggtttccaatatatgatgtccctagagggggcttccaaaattgacccggaagaggatactgtgtttgaagcagaagcagacgaagccacaacacagtcacctggcgaggccaagatcgttatggatgagccctcactcgagctgttgcacggcagcaccgtggactatactaccgaattgattgggagccagttcaagattgtggacaacccccgtgcaacaagtaactgcggttgcgggacaagtttcgatgtcagtgattgattgagcaatttgtcccttggagggataggagagatagtaactatttactatattttgccctttcttctcttgttttatgtacattatactgcattttgcattttgtatactggaaagatagataatcacattctataccccccttctcttgaatcggtcaagatattaacatcgatttacggtaaggagtcacgcaatgccttttagcaggtcaacaaaagccttcatagtattttgtacgggagagaaagcgaggttatccacacggagggagaagttgcgtggatatggatccagtttagtcaatgtataatagctggcttgcttgcctagcttgagtcggggacatggattccggcacttgaatggaaatgacaagaataagaaagagaatatacagcattctttatgaatcttctggcattgctttgcgcttattacctcatgaatcaggcgagaaaacagaacatcccaaacctcatctacttgcactaagcccattttgatttccctcattctgctcattgtagtgggaggcactgtatatcaggtaggcgtatgcaaatgcaatcatctcacaatgagagatatcattaatattatatcaaaaatcaccaaagaaaatccttctgacccttcaatgccttcgctaagacttccggataccattgccgcccggtaaacccaattctagcgtcctaggggatcttgtgttccagggacaatcttagtgctcctggagatggcattggtattcctggacatctggagacggctcggtgcccccttggactagccctggcatacaattcgtgaatacatccgagcgaagatctaaagtccctcggagattaccttttcgggaaagtacggaaccttccagattcggaaccacagccttgttctatcatacacagcgatcattgactcgggataaagaaggaaggagctcgactccatattagatatagaggcataatttaatacttgcacaatgcatatgtggctggtatatatatctcacgaccgttccaaggttcccattcgattattctagccagtttgtcggacaggagttaagcgcgacatctcctaggggcacttcaattcatcaccattacccgctatggagcgctcggaaattacaccgagcgaacagcagaggtcggggtcttcagacacgtctttcgatgaaacaagctcgcccttaccatcgtctgcgagctccttctcagatattacctacggcgcagacttgaaaccatcggaagtgttgaagtcacaggtcgtattcgtgcccgatctgttttcctctatcatggcagttgagccagtagtaaacccaaactaccacaaagtaaagccagaagcagatgcttggattgcagagtatgcttagccatgctccccgatggaatgatatcaaaactgacacgagactaagaataatccaggccgatgaaaaatgggcttccaggaacaccagggtagacctggcctacctagcctccatttgggcaccaacttgtgatcaagaggcactcaggatgatgattgactggaaccattgggtaggtctgaccgtatcttatatacagtatcagagcaaaatgttaactggtgacgaataggtctttctttttgatgatcgtatggtagttcctttactattcaaataccaacgtgctgaccctgtttatcaatacagagttcgatgaaggtcatctcagtcgagatccagaagcagcccaagaagagatcaaccgaactctggaaatcatggaggacacacagccccccgtgcgatgggatgataaccctattcgatttgtcttccagaccacatgggatcgtttgaagcaggtaagggaataatttaccctttttcgggtacagaatcaatcaaacgctgacctcaagaccaaagcggtgtggcagaggtatgcttggtctaaagtcatggaattggggctgttgagcagagcggctcaaaagtcagatctttttactaacattagggcagaccagcaacaacgatggaaatatatgcatcgacatttttttgatggattgttgaagcaggtcaaagtaatgcatagtcatcaggctcttgggcgcgatgtccaagagtacatggatatgcgcagagggacgatcggtgcatacccagctattgcccttactgagtgagtccctctccataccacttcatcctcccagcagactactagtgggcattgtattgactaggtccaggtacgccattggaatcaatcttccaccggaggttatgagcaattcttctcttgaggagtgtatgtgcatctcagcggatctggttctcctgtaggtgcaagatagctcgaatggaacaccagattcagatggctaatattttaccgagtcaatgatattctatcatacaaaaaagatctggtaggttggccaagcagcacatgtccaagactgtcgaagctgaaccattcttcaggcattgggagttgatcataatttgatctttcttctcagagctcagggtctttcgatgcaagaagcagtagatagaataggtgagatgttgaacaactgctaccgccgatggtacagtgcattgcagaagatggaaatatggggagagcacatcgacaaacaggtactcgctttcattgatgcctgtcggaatgtggccttgggtaacctgcactggaggtgagcggagacaaattcctcccaaatctggaaaatccagagcgaaattgctgacagggtcacgaatagtttcaaaacaggtcgctacctcggtgccgaaggagaccaagtgcatgaaaccagaatgcttcacttgcctaattaagtaccacgcagggaggctaccgaatcatgcctagatttaggaagccagagatgctcatatgatacggatgccccaaggactttttgggtacgctcgacaaattagaattctttattgctcctttgaatccattgaaatagaagctcaaaagatcagcctacccgacctggatatccaagttttctcttcagcggcgttcatcggaaccttaggcatagatcgcatacatacgcccctctggatttagtttgaactccccaacacagctttgaaaaggagtgatcttgactttgctagatactgggggtgactaccggagttactacttatgattatcgcagagccgaatagctccgtagatgggactccgaaaggtagaggccgaaaggtagaggccgaaagattttcaaattgaatactcggctcaagaatatctgggaattcgatctcactcgactcctacccaggatttactaagcttccacaattcttcttcctttgcctggtcaaatgcccaactgctatatccatattcgagcgcatctccacccggtggtgtcggatgaattgccaccgatgcaccttccaaatacaagccgcccctgccttccagctcactcgaaacagcaccatatatgctggttgcgcaggcctgtccgagactggacaagtatgccattgcgcgcttgtcttccaagacagacttcatttcctcctgagaatatttctggaggttggggctcataaaagccccagggtggacgctgaagccatgaaggccttgggcgccatacaagcgctcgatttgggtggtcatgtagatattggcggtcttactagatccgtaagcaagccagccgttgtagtttccttcccagttaacgttgtccagaggaatagggctgtagcgatgggctgccgaggaaacgctgaccacacgagaggcgaagttaggcgaggaacgtgcggtttccaaaagggtgtctttcagcagatagaagaggaggaagtgcgacaagtgattggttccaaactgaagctcaaagccatctttagtacggctttcgggggtattcatcacctttgttcaattagcgaggtcgcgcttttgtgtcggtattaatgaactcacagccgcattgttaatgatgacgttgagcttggagctctggttgagaaattcctcggcacaggcccgaacactggagaggtctgtctgatccatgaaaagaagcttcacacgcccggtatcgagcaatgagcccaaagcctcctttgccttttcgatgtttcgggctgtgccaaagatagtcgctccagtagatgccaagacacgtacagtctcaacaccgatcccagatgaaacgccggtgatcaggacaaccttgtctgcccactggccaacaagaccttcatcttcgataatttgacttccggttacacgcgagtcgcctgggccgtcgagaacctcccaccgattgtgctcggcataccgaccggagagttgaaaagggacttgggaaaccatcgacatgttagacgtgatgacaatcgtgaaacgtacggtcggagcataaataatccgaggctggtttactaacgaaaccgagatagcaagcaagacttcaccatcgtgtgcggcgaccgactgcttatttcaaacaaagcatggcggggttcaggcgatgtccaaccggattgaaatcggcataagttgtcgggccttgctaattagggaatagaccatctactggggggtacattggaggtggatacgccgtaggatcgtggttgctattactactgcacgctagcactggcgaagcaaacatctattcccgcgtatatctaatgttcggaattgcaccacaatgccttgggctacgatatccatagtaattgtaagtttctcgcaacttcccactccatctattgataccaattttatattgcttctcaatatggcgccaggcagccaatggcccccgctgtcaggggcttgagacaattctgcacctaacactaacaagcgcatactcgactccaagtatgatgtatgccagttactgaaccatatcagtaactctctcaaagtcctcaggccggtgttggaatacctgaaatctgttcagggactcatccccgatctcatcaagaacccggtgggctaggatagcagcaatcaacaattcggcctgatcaaccagcgagctccatgacctgcaatttcactcaggagccgtgcgtgaaacgattcgtcgcctatacactcccccggcacctgctgtaagcaatacagaaattcagacgattggataccattgattgtttacacatacggttactccgacataagtcatattttataagcacattatccactctattccgcttttgctcttatcttagctctgtggtgcacagattcggacccgctaggtgtagatttcatggtgcagggatcaattttgtgaatcacgtctttgagatcagaccaaaaggcctgagaacgtcgactctttccttttcgagacaatttggacaggtatgacaaaaacaaccttgtctagcgtcgtggtccggcgtcgggttaggctttgagcggcaggcggtagaattaagcataatggagtccgctgatctggtgcgatcgagacttcaaattgaatttgaaagcctcttccggtgggccgaaagtgatcctgcgctttgtgttgtctcaatgatgccacgccgtctcgtgtagactgcatagtgattaattaatggcaaccaatgcgagctctttggtgagacatgagaatttcatgagaatttatcttttctgttcccttgtgagccacagtcggggcgccgccgaaccttgggtggattggagacaacggtctgtgtatggcacacattttacccccaccagacgggatcgtccaggattgccgtacggctgaactatgactttcaaggctaatcattgtcatgtgggtcaggactcgagaagttatttgatccggtaagccggtccgtatactccgaaacacccctcagtaagtgcagtatgggcttgctagatcctgtaaagcatttatcttctaggctattagatggctgatatctaccatcctaagcaaccttatgaagttcttatgcttctgtcgagatagcaccttagtgagtctatcggtaaccatactcgcttagcaacccattttaccttaatgcgtccctctctaacctcttatagtagcgataaatatccatatatcgaagcttcgttttatatgctataccctcactttttaataggtttatagtcctctcgtcattatatataactaatagtaaaggtatatgaggggataaagctatggtattaagtgttacgatctggcggctaggagccgtcagtgtgacgatctgggaagggtcgtacttaccagacaggcaggaacgaccacgccctcgccctcgcaccttcccagaacaaacgagattaagcgagacaattgcgagttttgcatcgaatacaaactcaaaagctagtagaagatggttgctacttttctattctataacctttatattcaaaagccgtatggtagtagctagtagctaaggtctctatgaagctctatagtttagagctaatgatatttctacttaaggaggacctatccgaagggaaagtctttcaaagactttatgctcttcctggtatttttcgatgtggcaaccataggtgaggatgcgtggcggatgacgaccgcgtgcttctccgtagaacaggatctcattccaggaagggatataacgagaaaacaggcgctctaggtgagcatatagatttcggtggctgtgtgggtgtagattattgacataagaggtgatgcgaacatcgggtgtgtcatgaggcgaggaagtaaattgtacctcccatggcagccactgaaatcgattggaccaacaactcttctgttcatccctgtgacgcgtatcatggcgccggggcctattatggcgcctacgcgtttgttcaaggggatggaccggcagctctttcgcagtctgtccggtcaaatgccaggggtcatcaagagatacctgtccgccttcgaccaaccccggggaccggtcatagacaagggggaactcggatggatctaccagaggagagtcgtgactggcttgcgttcctaatcgggctacctctgtcttaatatccttttgcggcagtggcacattagcctggcatacagcagaagagctgtcaaatactagcaaacggccagtttcttgccaggtctgcgccttgtcccgtagctctgcgatgcaccaatcccaggctggtgcactgataagagactcttcacttgctactgcctcttggtgccattgcgcgagccgaggttcatccggatccagcagcgcttggtcccacccgggctgttccgttatatgttgcataagtcggatcatggtcatctcgcgctttgtcaaccggggcgaatggcgatattcaattagcgcatgggcaaagcgggtcgcggtggggagctcatagtccaagggaatggagccaaatccagggacctggagtggaccatcggtgttgttgagacttgacattattgagctttctgttctgttgaaggcagggctctcataactatataaagagagaagaaggcaagagaggcaaacaagtctagccctgacatttcctaatcggattttatcgccgtgcggggtgacatatgagtggactagacgacctcgggaataatatacagatactaatcgcgatagagatattacacagtaaatcagaaagccacatttcaaatctaagctacccaatcgctctgtagctttcaaggctcctcaatgaatcggactgcgtgcggatactctgtatggtcatcatatggttccggattcttgttgggcaaaatccgcaaatgattcctactgatcctgctctgttgctccatacttcaaagtagtttgcaccgctggttgttgccagtcgatgtcttggaatgagaccaactcatcctccaacacaacagttcgctccgcaatcaccgcaccgacgtaatatgcacgaagtgaatttttcttgtcttgagattgtcctgcctgcgctctgcgtgaccatacactagcgctgtcttggcttggagcaagaagatcccccgctggaatagttaggcggttgtcgcgcgttgatcaggatgttggtcgcccaggagcaaactgtgccgttgctcgtcatctgagaccaaattttcgtagattatatttattatacccccgtccagtcgttgcatcggccagctcttgtaaatcttcaggcccagtggtcgatcctagctcgttgtccttgagtaggaatcggaatcataatcggtctcgatgctataaatgaactccaagaaagtgcagacaggaccagacttcaggatgcactcagtgcatagtgtgtgaagatctccattgatagagacgttgatagagacgttggccaagtaaccctaataaaagtaaatcacttcgtagttatacgtgagctaggagcctaccacaacaatgcgggaaaggatcggaaaggatccaatgaaacgtaagcgaggctcttattttggcagagttgagagagatatatgtatgttttcgagaatcaatgacgatctacaatgagcaagacgtaaagagtaataaaagtgtggattcagtattggatactggacttcatggcctaatatataacaagtgtaaggagggataatatcggccgcaatcacagccaaattatcccgtatcgaaaaacagaagtctcgcttctaaggttcaatggtctttgttagtacgttacagcaaggcttggttagtacttcggcgacaatctgatataaaccgttgatattggtggtgatactagattgttaactagatattagttttgtcattttccctttatctagatataggattcaaagattacctgccctcctatgggtgactagccaaatgcctaccgacgattgcctcctataagcctgagtacgatcggtatttcagaggccaattttcaaaccgcaagccgtgattgtcgaccaagccacactatccactgcccgtaagctgacggtcttcaagcgaaagaagcatgtggaggaaatcgttctaacaacgacaaagaaattttgcgaaagtgcgaattaaagcgccaacgcaccgacggacacattgagcctcgatcatggggacaatctaatgaagcagagtccaaaagagaaatacagtcggaagaagcgaggatataaagccctactggaatcctaaaaaagatcaactctcctcagtgtgccgatcccgtcactcgaaacgagatgcagtataccgccgtggttcgtgtcggtaagtgacgagctccatagctccctagatatctagaaggatatgaatggcgagatatacttgcaggacactaagaaggctgaaatattggatatcgatgacttgtgtatcaaaacttctggtaacgctaaaatgagaacaacaaatgcctaatcccacgcagagatgaagaccgtcttcattaatccttctccatcttcgaaagtccaccacggctacgccgaatgcgttcatcgagagtatcctcctgcacccgtttattgacatcagacatgaacctgccccggtctgaacgctgccgatcatcagcctcccgctgctcttcttccttggcagagatctctgcgagtcgccggcgtcgctctgattcgatttctgtggcattgtattgcatctctgccaatttacgacggcgctcttcttcaagttccttgggatcgggcttgttcgttggggtacgggtcgagggtggccccatggcgcccctggcagagtcgcgccgattgttgtattcgcgtcgggggaagtcacgactccgatcttcgtcggcggcggggcgttctttgcgatcgctagaaggccgaggagatcgagagttccgggatggtgagcggtctcgtccacctctgtcttcgcgatcttggtgtcggctggagtgggagtctctcttgtcatggtagtcgcgacggtctcggccccggtctctatcgtcccggcgagaacggttctcgtcgctcctgcgatcacggttgtctgggcggtattcgtcgtcgcggcgttcacggtcacggtcacttcggtgtctgcgcgaagaccgatctggcgaagcgggtgatctagatcggtgtcgtcgaggtgaagaccgtcggtggtggcgctcacggcgctcgtcaccggcatcatcactatagcgcctgcgctttgagtcgtgggtacgatggcgacgatcacgatcctttccccgatcgcgatctccgcgttccttctctctttccttgcgcctgagagtctctttcaccatcgcctcataggccgcttgttctctcttcttcacttcgagtagcgggtccgccataaccttcgacatggtgtcgcgcgccgagacaatagatggaccggccgcggaaccattacccaccacctccgaacccttctccagcttcttagtgtccggatctttcttcaggaggactccatcgatgcggcgctttcccagcagatatccctccatctcctccgagtagtgcccggtctcgcccgagggtgcttggtacatccagtcgactcgactgtgttgctttgcttttccggaggcttcttggaggcgttgaatctcctccatctggcgctcctcctctctttcacgctgtagttgcgcaatctttttgcgctcgtcgagagcgcgcttctcttccagccatacacgctcctggttcttgatcaagcctggatgccatgacctggttggacggttagcgttatgcttctctcttgaagtaggtattgaagccggaacaaggtacttacttcttaaggttcaaatctccacccatgatgcctggaaataggaggaatagaatgtaaaggagcttggtatgagcaagttgttgtccgagggtccacgggtaaatctaaagccttaatcgccaccaatcacgtgatctagaaatacgatacactctgatatggagtgtgttaactatgtgatacattgaatgtgtcgaataaaacgggaataataaaatgaatatcttctattttcctctttcatagtcgggatatcagtatggcctcaaataactaccaatggggcagaattaaccataaagcagaaacattagagatgtagtagaagaagttgagaataaaaacgcgaaaatagcaaatgacgggggttggttctaaatacaagatgaagaaccgaaagaaaacgcatcatatcatatcgtcatcgccatcgccatagaactccaagagcaaagccggattaccagaaactacaccatccaatccaatgttgacagatattctcaacattggttgcctgcgcaatgagcttgtccacctggtcgctgacacttagctcttcgctatttcggaagtctcgtccagtgagcttctccttgactcgggcgagaacctggagagcacgggcattctgtgcctcgcgggcttcttgtggaacgccttcgggagcatcgagaataccaccttcaagtatggatgggcggcggcgacgggagaattcgcccggcggctgcgcaccgggttcgaaattgacaccgtccatgatagactggcgacgatccgcggtgagagaaactcggtctggggatgagtcttgtgcacccagacgccagttaattagagggtcgtggatgaactagaagagttaaagttagtgtggttcgagaacatccagaaatcaggtacttacagcctccaaaaccgccatcaaggaatctttatgctctcgtagaacacgcatgacagcctcacaagtgatgcggtagctaccctcaatgttgctgacttccatggcgaatgtcaacatgcgagtaagtcggaacggaactcgctccgggtacttctctcggtgcatcgcgatctcgaaacaatcaccgaagtcgatgtgaaccacacggccattaccacgatccagcaacaagttcgatggatgtctgtctcccagaccgaggatgtagcccaccatagacataacaccaagcgatcgagtgtaattcgtacggcgctcgagccatgcctcggagctcttgctcttgagccatagcacacggtacagatctttgccggtcgtattgtccatagcgtaaccgaagacttcaaccttctgcataagggtaaggctatcgtagtcgggtgccatttgtagcatgatccggtgctcaatattgagcagaatccgacggctttcacggtattccttgatcaaggcatggaatgtatcgctgttggatacccatcccagaagaccagagctctgagacaatggaatagcagggaagcgctgaaccgacaggtgtcgcttgaaactctcgctatcgttgtccagcaaggtattgcacaaaccgaaaagttgcatgactcgctcatcttgtcggatatcttcatgacccttgacaaggtacatgtaagagctaccgttgctgcccttgagcgtcatacgacgcggtcgtttctttgtctgcaagacatgcaagatggggtcaaagctcataattcgaataactggcttaccactctggtatgttcctggaacggcaagatcaaggtctgagcaatccttgagtcgaggagacacgtatttcagatccagagttgatagctgcggcagttgtcggctgatcttgcggaatacggtgtaatacaggtcccaagcttggttgagatcgccgatttcatctgattcgcgaaacatcatgcagtagtgcttggcttcagccaaatcacgaccgaaagcttgcgcaaatgacacctcacgaagggtctcagcgcccttgtctagcatatcatggaagggggcaagtgttgcgaacatgccgtcaacatcgttatcaccgaaatagagacgggaggcttcttccagaccttcatgccaaagctcatgccacagcaccgcaacccggataagctcatgactgacaaggtctgcttgctcgaccagcttggcgctatgttggcgcatactttccatgatgttgctagcagattgagagcgtcgggtcacgttcgatttcattgctaccgtcagtggatacacaagggcttgaggatgcgctttgccaacctcggcaagcaacctgtgaactgcaccgcggactctgatattgggctgattgattcgagcgataagttgaggagtgacagcaagccaagtgtcaatattgacagccgtaaatccttccgtaacgacggtattcacctcatgatctccgccatgattaaaccacagagtgagtaaccttaaagtgtcttgcaacgaagacgtcaaggacaaagcgatggagcgaatgaatccgcgaattgcaggaatcacatgttctgtaacgatatgagcaggaacagccccaggcataccctcacggctagcctggtttgaaatcgttgtaacaacttcgaagtttgcaagtgcccaggagtgccacgccttgtatgaatcgcggttgtattgggtcgccgctgagtaggcattgagaacctctcgaacgtgttctggcctccagtcacccctctgtagggtggtctgccactctccctgcctcagataactcttggagagaagttttctaaatttgttggcatcaccaatccgttcgttcaggctgatggcgtctggatggttctgatcgacgaccccgttggctccattcgcagcatttgataccatgagtgtgttgtatcgagaaaaatcatcggtcaggccagaggtaaattctttcatcatttcaagagattctagttggtgaccgtttgcccaactgaatttcagcctggcgtatgtgacttcgggtggtgcgatagtgcgcgttccattggcatcagacaccactgtctctagagatgcaagggaccgttccgcaagacccatgcggttggacttgcgacaaagattggcgaacttgatggacatatcaagattctcacgtggagcagtgacaagagctctgaccttgagcatacgctgccacacttccacgttttgctgacatccgagcaatctttgattccaagttttacgcatggcatcttgcttttcggggtcgccgacgttttgcttgtatgtgatgatctcttccagctcagcgagcatctggacccggacaacaacgttgtacgcacggttgtatgactctccgagaagagctgacaattcagtatcgagaccattccgagccttctcaatgtacatgttggcttcttcgaattgattgcgatggattgccagaatggcaccgaagaatgagcggtccggggactgctctttcatgacaccaaggtaagagtccatcaactcccactggcctcgaccccaagcagcggcagcagcgagaggtgcaatagctcgtcgatgttccagtgatgcttggttccacttttcttgagcgagatccgagagaactttccactcgccaagagcgtgcaaacaccgcattttacccattgtgataccaaatgagtccgggtccgtcttctcgcgtcgcttgtaagcagcaagggcttcgtcccaccgttgaagcttctcgaaccacgtttccttgagctccacatcacgatacgcctgcgctttgcgaaggataccaatggcagcgtcagactgctgaagctggttgttaatggtaattaaggcttcaaccgcacccgagttctgatcttgctcgaactcgagttctttgtagtgaagagctttagcaaaagcatgacactttgcagcatacttcccaagagtgcggatgtcgatgggaagagccttgtcatcgtgctccatgaattcggccaaattgaggagaatttgcaaaatctctggggagatgttgggagaggtaagcgccttttcgattgagcggacgagctcttcttggtattgatcatacaactcagtccaacacgaaacgaaggcagcattgaaaaggtcccttgaaagcggctggtagattccggccaagctagcacatgcacgcaatgccggggacggggattccttcaacagctcaatgctgaaacggcgtatccattcctgccaatcatcacgagtggacttctgcgaagcatcccacgcattcttgagatgttgctgattcacaacaatctttttttgtccaatctcggaaaaattggtatcgtccgtggggaaagtatagacctcttctggattgagatcctgcggaagtgggtcgcccttctggagtttcgtcaccaggatctggtagttcacatgcacgatctgattggttttgaggaccttgttgagaagatgaatgtaatgggtgaagtcctgtcccagctggaaaatgagagcacaaatgcagtccatcgcggcttgacgcagcacacgatcaccgctagccacgacccgtgatagagaatgaaccattagggatgcaaagtcagagacattgacttgccgcgataattttgtcaagctatcaatagccgatttgcggatgctctgaggattttgtggccgatcgaacaaacggacaatggaaggaatgatgagatgcatgtattcctctccacttgtgccgaatatcaaaagagcatggagaatcttctcggagggctgtcgacgaggcgaggtgtctttatcaagcgtatcgagcatcaaagggatcaggccagcaagatacttcctgaattctccttccagcgacctagcaattgcctcgaccaaggaaataatcgtaccctggatttgatatgaagcatcccagaagtctctaataacctcgattatctctggcaagaaagtacgaatatgctgtcgcacgatattcaccaggattgccatctgattgaaatagggctcaagacggctagcaggagcgcttcttatgaccaagatgaaccctggaataatttgtccaaggaatgggacacacttcagacccagagtcttgaaaattgtgacgatggcatcaatgacggctgagtgatattgcgccagggagttttcccgcaaaatgttctgcatcaaagtatggattaccactgtgggataatactcctcattggagggcgtgaggccctgcataatgagggcaacatcagaaacattttgtatttcgttgatatggtgtacgtcaggttcaatctcgctgatctgttggtacttgtaggggtcgagggcaccgaggactccgagaagcttgatggtctccttgcgtagagagcctgtctgttccgttttgatgatgttgatgagcactccgagaagatgggggtattccatgtatggctcgataacatagcctgaattactggccagctgtcctaatgtccgaagcgcagcttcacgtttgttatgcgacgaaaggtcctggagtgagtccagaataattggcataatctgcggcaaatattgtctcatctcatggccgccgacattggcgagctcaccgactgccttcaaagtagtggcagcaacaccgggattaatgtctgttgttttgggcaacaatgcggtcaccatgggatcaacatatgacctgatcaatttcgtcgcattcgagacaaacaagctgatgagttgagccgtttcctccttctgccgggcagtatttgcgaagccaaggccagtgagaagattgaccagcagttttcggagtggcgggaagacataagcagggttaacgctggaaagtcgaccgataatgcagattgcggcttctttgacatcgaaaacctcatcattgactgctaagaacaaacatcgaatattctctggtcgtgccaagtgccgatcaaatttgcggtctaatgaccacaagacagtgcgccggatttcaggatcagggtctccgatacccacagtcaacagcttatcaataacctcgctgacaacttgaatagagtgtccactggtttgattgatgatcggatcgtgaacgaacagctgacagcatgtaagagcggatgcctttcgaatctcgggattatcattttccacgtagttgatagcgacatcacgcacgaactcgtttaatatgtgcccagagaaatcaaagctgcccagtgtgtgaagtgccaatgcgatatcagaatcggagtgaagctcattgggtgcaaagtcttttgcgaatgatggcataggaggcagtcggttttcaggacacccgaggggccggaatggcgttccacaaaggatgatactcaacatatcaagaagcttttcctggatcataggtttgatgggaggaatgtaatgggccatgtcgaccagagcctgtgttaatgatttgctcagtccacaggcgaaaatgggatccaggagagcttccatgtatttgctgagcgcctgtcccactgcgagggacagcatgctgatgcactcaaacatcggcgcctcgttaactcctgaccgattcctcgccttcattgcaagcccctctcgaatgtagatgatgatgccgtcgagatattggccgatagcggtgcccactgcattggcaatctttccaatggcgatgaaggcagagttcctctctttgtctctcttgagttgcgcttggaggtagaccatgaatttgtgtagatagatctcagtgaaatcggtgggtgcatatgaggcaagaatgggaatagtgaggacgacttcggtgcgaatcttcgggtcgcgatggtccttgagacgaaggatgatttcgcaagcatcccgataatgttctttcatgaacatcgtgcccttcaagatcaactctttgatgatcaaaatggagccatggatccagtcgacgttatgggacttcaagcccagaagtgcttcgtcgtgtatccgtgcaaaccatgattgacggacttgagaatcgcgagccacgattatctcaaagcattccccgacggcctcggcggcggtctcgcggatgagtacttttgggtctcgaagggcgacccaaacaagctcaaaaacctgcggaacgaagccgtagaggagtgttggtgagcccttggccagttccctgattacaagaactgcagcaaaccgccgactttcctggcgctccgattgtagccattctaatgcggattgtatttcgctttcgaccagttctgcggttagagccccgcctggcttcgcgagtcggcccagcgatcgggccgcgtacaccaggaccgcgttatcattgctgcgaagggcgctgcgcaagtaactggcaaatctggtcgttttctgagccgcatcaactccgtcaaagtcaatgagccgatcgagtgctaacaagccaccgattctttcgtttgcgtcgctgccgttgaccacgagttgagcgatacgttggctaacagcgttgtaaaattccacgaacttctccgatggccagtctgcacaaggaaatatgttagctagtaagatgtcttggaattcaaccgttaatacctctagacacggagaggacgttctcgtagagctcgtatgcagctctggccctggcctcctcattctttgacttgagctccacgaacaacctttgggtcacgtctgagattgcgcctgcttgggccatatttgcaaatcacaccccagggtggacattggaatacaaggtctaggccataaaataagaagacgcggagcgcataaagttggatggtagagggagggtcatgtgtgaggcttggagaaggtcgatgggtgcacggaccacgtttggagttcccgactctctgtgcgactctgacaccctcggccatctacaaccactctataagtaatcactacgaactatcttggtgtttattttgaatttagtgcttggtatactatagatgactcccggtgtttgaaatttgatatgtctgaaaagtcatcttatcctcaggaaatacgtcacgtcgcttcaggttctaacatttgtgcgtgctcgatcatatagaaagacgacccaaaaggcatctagtgctgaatgcttgtcttcaagataaagtcaaagacagaggccatataagcaaccgacttcttatcattgagattttacggcgcacaggtttgcttgcatctataagtgggacataccttgttcaatctttttgtcaaggtggattcagcctcgcgataggacaaatactcaagtgtttggtatctttaagcaaaattgcttggtcttaagcttctagcataattacatagtgtcagttactatgcgataaatcaccttgactcgtactactaccatattactcgatgtaatccgcctgcatgctatccgattaatcgatgcccggactagcacctaaatggactcgaactccttggaaatttttggtgctttacacttagatactgcaaaattacttcagatcaccataaatttatgtaaaggtgtttgcttttgcacgttaaacggggtacccatttggatcttccaaggttggccagggtaaggtcgacgccacgagcgggctggtttgatgactaagacctggcgagccctggcctgcccacattttgatccatcaacttcgctgtcccgacaacgcctcccatggccagaaatgaaaaatgtcttcgcgggactccagctcctctagtggaacaaataagtttgcattcgtgacagggaacattcattcagaagctcggagccatgctatgaaggaacactggaagcggcgacatcagcgcaataaagaggcaaaagcatatcaccagagaaattcatcgcgaaatttgcctctccgttcaaagaaccgcgctagtgaagatgcgagtacatcttcagggttgccagaggttggggatatggacattggcaggaatcaagaggaatctactagcatttccgcccagctgctatgtggtctgagttctgcgctgtcaatctcgaggcctgatccgttccagacgtgtcctgttcacctgacgagccagcaccaaaagcttttgcatcactgtgcgcatgaggatttcagaccttgctatatgtggaaatcttgctgacgggggtcgtagggataagcactcatgcggctatgatgtttgcagacctgaatgtcactgagttcaatccgatgaaagatgtttggttcccgctggacctctcaaatgaatcgtctttcaactgcatcatggcgcattcagctgcgcacttatatcatttatacgctggaactcccccgcgacgagggtcgaaatcgtttgatgccttgaaatataagatcgaggctgtcaggatactacgcttttggcttagtgatcccaagaaggagctaagcgatgacgcttttgctgctgtggttcgtctgcttacattcgaggtgtgtcaactaatagcaatatcctctgtgtgagactagctgatcgcatttgacctagcgatactggggcacggtggaagattggaaaatccaccgtgatggcttacaaagaatgatcgacgccaaaggaggagttgaagcgctccacagaaattggcggttgcaacttgtggtttacctgttagtgcagatggtcaaaagtataaagaagttgcgatactgaatatttgcagtgtttcgttaatgtcacgaccgtcatggctcgagtccacgaacaacctcgaacgactctctcgtcctcttttatcgcccaacgctacgcaaaaccccttatcttgcgatgttcaaaaggtccgctgcctttggctgatatcattcatccaagatatgagaacattcatgggatcagtctacactagagggctctctgcgtatcccttcactcatgccgccgtaggcctgttgcgtgagaattttctgctctctattgatccttctacccatgagtatcacaatacagagtgggaagacgaaatgctatggtgtttattttgcattagtgtcctaatgcaggagtcaatttccgccctgtcagatcaggatttaacagcatccaatggaccgagcacactacaaggattggagatatccctaaggcactctcatcatatgtgggggcgctcaatccaccacttgcgctctatcttatacgaaagcctgacaaggctcgttgaggaagggcaatacaagatgaattattttatggacctggtgcaggttctgggaaccttgagtttggaagcgcgccaaggagtcgagaaatgtcttctcaatttgctttactgcctggggaataacaaaaccagcgcgctattcgttgaagatggatggtcgccggattcgcttctgtcgtcaatgcgcgggcgttagagtatgcagctggatttattattatatgtaagtacatcacgaacgttagaaatagaataagcagggcggagtcatgaagggttctttcagtaatatccttcgaagcaagagaactgcatcaaagctccaaagttcggaccgtcctcttcgagatgctcatcttcaacgtattctttgaggctttcgtcgtctttcttcagatcggggcggaaccctctctcgtcgcccgtacttgtcctcggtcggctggccctcgttttcatggtcgttttgctgtgaccgttatggtcgctcgggttcttaccacaaaaacactccttgtgcttggtgggctgctgagtattaatcatcatatctcggcttagcatttcaggatggaagactgaatgagtggccgaatcacgaaccgtgtggctattaactattctgtcagaatctaggatgaattcatccctgatacagatgggtcacgtgattgaccaggctggttttactgcagaaagaccaactcagtggtttttcgcctttcatttcattttgtttgtttttgattactccagtaatgatcattccaagccacaattactaacaaacattcgaataagcttagtcttacttatatctgtaatgaaaagcatagttgccatactgtcaatttgatagagagtcaatttgatagatacaagtccacatgtgcctaattcatcaccctaaaacacccaaaattatatggcctaagtccacccgaaatgacttatttgtacaagtcagaatggtcacgcttaatagcatcggcacccttctccgcaatcatgtaaacggagttctgaatccgacagtcgggaatgacagggatacaagacgcgtcgattacacgaaggttcttgatgccgtgaaccttgaggccgggatccaccacaccttgttggatgttcttggacaggcgggcggtgccgcaaggatggaatgaggtctgggagcgatcgagcacgactctcttcatgagcttgtcatcgtgcagcggcatcggccaggggtactcgtcctcaacgatgtccttgaagccctcgccattgagaaggatatcataggcataccggataccctcgcgaatggcaataatgtcgaggtcattgttgaagtagttcagattgatattggcttgctgcagggggtcgctgctgtggagcgtaaccgtgccgccttcagagacagggcggacaagatccaccataaccgtgatatagttgcccttactaggggtaggatagtgccactggaaggcactgccaaagagacagacaaagtcaagttcgaaatgaggctggccgtatggacagaacggatccttgttatcgttggcggctttcgcttcacggtacaggggatccttctccaggtacttgtcaattcgggggaacccaaccatttcaaggaatccggagcccaatggaccaccatgactgttttcgtaggcttgaatggctctatcgttgtgtggggttcctttccgtaagataaaatcgtccataccgaagccatctttgagacgaagaacgaaaggaacaccggggtgatccaggagatgctgcccgacatgagggctatcaagaatcaccgggataccgtgcttcttgagttccgcagaaggtccaataccactgagcatcaacagcttaggagtctcgaagacaccttcggagacaataacttcacgggtagcaaagagattaagctcctgaccagagcccaagataacagtaacacccttgcatgtcttgtccgcagcatcgataataaggttcttcgaatgcgcttgaggaagaatagtgacgtttggcttatcggcaatacacaggaagctgccagagcgacgacccttgtagattgtgttgacactatgagtcaggccggacatagtaccgtcgaaaatattctcggttactggatgaccagtggatttccatgccttggtgagaaggtctctgaaaggcttcatctcggggatgagttccgagtgggcaatcgggatcggaccgttactgccaatcttcttcagctcaggcgagtaggcatttgcatcgtcgtggtaggtgacactctttcgcaggtagggaacaagcggatcccaagtccactcttttccgccatactcctcccacatatcaaaagttccctttgacccaggtgcccaggtgaagtagttcaaggaggaactgccgccgaggacctttccgcgcgtgttgggcttctcgatgcgctcatagtcatctcgcttgaccattgttgttttgaacgcccagtcatactcgctatcgcgaagttccatcgcgttagaaggaactcggatcgcttcaaggtccttggcgttctcgacgccggcttcaacgactaggattctagcattggggttctcagccaggcgaccggcaacgacgttgccagctgtgcctccaccgacgacgatgaagtcgaacctggcattgtcctggacaacagtcatgttgagaagtgaaaaaggttgagaagttgtaaggaagtgaattatctgaaaaaggtgatctgtctgcggagtgagcgacttcgagacgccttttatatctgacaggttgggcttttcgggatgaggagaacgtctttcatgagataaccagcgcatgcattcctcttcctaatacctcatgtggcgtcattgatttgagtagagcaaaaaacacgcggttccacagacaagggcactgtattgtttactactggtcttacgggcacctagctgaggaaggtcttactagtgctgagccaagtgatccacccatattttacggccagtgttctgatggtcatcctagagtttacgacgtggcaatggctcataccgacctgtctcgatcatgtctaacttcgtttactacttttcgtatggtcatcttagagttttcagtgtggccatggcttgtaccgatctggctcgaccatgtcgagatgtcacaggatctgcattatagacattcggcggatatattggcttgacctagtggatagaagcgaaaagctagcttctctatccacgggatggttctgacggaatgtggggttggatagatacatagatagtagatcaggatgatcgcacctttgagcagcttaggtggagctccaccagatgaagtgggccatttgttgttgcacgttgggcggccgatccatgggttggctagatactcaattgagtttcggtttgagacacgcgaaaagtgaattgtcaagctggtggaatccagatgcacagctgcaggagaactagggctagatggctttatgcctgcttgacaaagctggtcgcaggtctgaatgagaacgtgagagtctgaaaactagtattttagtttcgggaggtcaagaatctagcacttagcaggagtggcgggcttcggatacggcatgcatgaatactcctatgctaccctaaaccgatgaggcaatagcattcgaccagttatatatcggtatataactagtgattttcccactacccaatcaaggcagaaaagcctctgttgggagtagaggagtagaattcaggagtagcgggcttgatgtacggtatggacactcctatgctacccaggatcaatgaagcaatagcattcgaccaatcatatatcgacatgagtttggtgattttcccactacccaatcgaggtagaaaagcctctgttgggagaagaggagtagaattcagcacttgggtcttgtcttaattcgtgcggagaactgcgtcaggttctagtgtctgcataaattggggtctcggttgagcggaaaactgaagttcagtcaagagtggatctatcggtttcaaggcatacgttagcttctttaggaaatgctagtcgacaaataacaatcgtgtcgtattgtagtgacgtaattatgcgggtccctgaagcttgtacagagtacctgggaccagatacagatatgatgtacaaccaaacacagtactcccgagatgacagtcccactagttgtagatctgacacttcagaggcctggaacggcagataatcgggttgagcttgaatttagcggtagctgaaagcggtaatttcgtcagaggtagatatcttactgagtataattgaccactgagatggcggaagaaaatacagtgctaatcaagatgtcctgaatggtcagtacatgtataatggaagcgtcattaacgttggggaggaatggcggaataataaagcagttcactaagaagttcattagcttaaattggagagccctggctgctttgttctgttacatttcccttcacatatcgtttgccccaacatttaccatgtctgccgaaaattattatactcttgcggaaggtcagcttttttggggggcatggggggattagcaatcctacaagtactaattctggaacaggatgccccttcgctagcaacaacaccgcgctcttgatgcggaatcgtccaggaactggcggtctaggtctgctccaagacactcagctcattgagacactcgcgcacttcaatcgcgagagaatccccgagcggtatgagccggtctatctactctacaatattgatcttaaactaattggcgttgtagcgttgttcatgcaaaggccgttgggtaggtgaaattgggtggttgaaagttggtttgcaacaggtcgctgactctcgctcctattgtagcgcatatggagaatttgaagctaccgaggactgctccaacctgacctccgcgagcttcctcagcaaagttggaaagaagacccctattctccttcgtgtttccaccgtcggtccggaatcgggctctgcggatacttcgcgagacgttcatggatgggcgatgaagatgtacaccgacgaaggaaaccttgactgggtcttcaacaatacggtgagtaacttcatggtcctatactaaggtaaaagggctaaccaaaatttcaagcctgtgttctttattcgggatcccatcaagtttccctctgtgaatcgctcccacaagaggaatccccaaacccatttgcccgatccaaacatggtaagtctccaattttgatcaccagacaatccaacaatgaattaacatagatttagttttgggagtaagtcccttagatacaagcttgattttctgcattaatgacatgctttagcttccacgtcgggaacccggaaggcatccatcaacttttgattcttttcagtgacagaggaaccccacgatcagttcgatttctcaattcatacagtggacatacatacaagttcacaaaggcggtaaggacgacagccttggtgacgattacttatcgctaactggctaggatggttcattcaattacatcaaagtccatatgaagacgcgacagggcgtgaggaatttcacacaagaggaagcaactcgtgtcgcaggagaggaccctgattatatgatcagagacatgttcgacgccattgaacgaaaggacttcccgcagtgggatgtttttgtgcaagtaatgagcccttccgaagccgaaacctatcgctggaatatcttcgacatgaccaaagtctggcccaagaaggacttcccattgaggaagattggtaaaatgactttgaatcgcaatgtgagctatggctctctcctgaaattgatgcttattctaactatttagcccgacaactattttaccgacatcgaacaggccgctttctcgccttccactatggttcccggatttgcagcttccgctgatcctggtaagctacatctccaatgttcattgaatgacctgtggttgattcccgaatctagtcctccaagcccgtttgtttgcgtaccccgatgcagctcgataccgtcttggtgtcaactaccaacagctccccaccaattctgccaaagtccctgtttactgtccattcgaacgagatggagcaatgcgattcgataaaaattacggtgctgaccccaattacgttggatctaccctgcagccaacgcagttcaagactaaagaaaacggtgttaccgctcagtcactcagcgtccataccgaccacgagaaatgggctggcgaagtgtcagcctacactagtcagattactgacgatgatttcgttcagcctgcagctttgtgggaaatccttgggcgcgagccagggcaccaggacagggtcatccataaccttgcaggaaatatcagtggggttacgtcacccaatttacgcgagggtgtttacggttcgtttgtcttgtatcgctttcaacttatggcttttacttactctgaactctttgcagcacttttcggtcgtgtcaatcaagaactcggggctaagcttcgaaaagcgacggaggccaaggttaagaactgaatggctcgctgtctgtccagtatggtgaggaaagaatatattgcaagggaaagaaaaagagaaaatctgatgtcttgaatatctatcaaaaattatcgcaagttatgctcaatttactgtatttccacgagaccaatgttcaaccatcgtagtaccacacacttccccagctgcaccaccgacggaaagcacgcttccctcatagtctggccacaaaaattgatacatacagactttatgcatactcaccacatggtatgaatccagctatgcagttgtacagttaaaagacagatcgttgacttttgaatctgatctgatgcacgcatacaatctacgagtctggagaaggcggatgatcaaccaatgcgaaactgtaagatagattggaacctcggaagactagctgcttccctgaagctctctagatagctttatataaacaaaagcaccaagatcatctcctctggaagccaggtaatttccaattgaactgcttctcccctgcatgtggtgtctttgatttgtgcataaggacataagcatccatagttaaattttttcgataagcagaggaagaagcaacaataatacgtaaataacattgcagaaggatggagaaaggaagctaccaatcaggggcattgcaagcctttatttctcaaggatagtgcagactacaccgatcaagcacctgacattattctcatcttactgcagtgtttataactaggcataaggatttccgagaataattgaatcttcaagtgtcatttgaatagtcagaaaaaaaaaacagctaaggaatccagcgagcaatagaatcacatcaagcctccataggtctggccctcggcttccaactccttgtccttctcgtagtagtctttgagggctttctcatccttcttcaggtagtcgtcgtagaatttcggtttatccttcttgttcgacggtccattttgcttatcagagtgggcgtcttcttcctgattgtgcttatgatgatgatgctcgaaaatcctctcgatgagaggttctttgtccttgacaggatgctgagagtctgctttgcttttgttagccccgcaagaagtcatgcattaagcaaggcggcaaaccttcaggcatgttgatatttggtgggaaatagcttggtcactttgcgatttggcaaggaaatgagttgtacaatcctgtggaacgatatataaatcacaagaagcacctcttagctttgacatttctctctggccgaccgagcttcaatgacgtggatgacctcaaaacgagctgatcccaaacattcctatacgggaagtgaggtgtgaccgcattttgagtttctatttgttgtccgatcgtggaacaactacctaactagcggacgaatgctttacaattattgtcgggtctcgaattgcgggtaaccaacagcttagtgcaatctagtagctcaactctaaatcccttgggacgccgtcggttcactgagaattcacattctctgctttcatgcccgcttttgagcaaacaacatggagcgttggtggattctgcctgggtgtaaacgtcatttagactcgtgtttgaagttagtatggggatgactgttttgacctgtctaggtttctcctacgcgaacaatagccttccaaacggacaagaaatgacccaggtctgagcccagggaagaattgaacggtcgtaccacaatcatatcgggcagaaggatacaagacgaccccaatcagggcaaacactgccctcaagtaatgccatgtctcactcaagaccgattttgtaacgggcaccagcttttttgcccctgctgggaaggtccaggtgcagaacggcagtagcatttaacgaattaggtttctgcattagtagcaaacacactttattagcagccatattcgatgtacgatagtattagaagtcttgagaacagaattggtgtggacctgcgacgaaataaacgagttgttgatccgcctctctgaatcgggtagtactaattggccaatcagaagacgtatctgccgtatatagcacgcctcccacgccgatccccgagatcagcaaagggtccgtcctactggactagcttggagctcggagtcaagctgctatactaagctttgaaatccaaatcctctgtttgggcggtacagtacagcttcagtccagatttgctatcttcaacctcgatttatcagactcgaaaatatcgacttacctccttatacctggataccgtgacgaattgagcagtgacaacttgtcgtgtttccaagaaatcaacggaaggaccatccatcaaaacgttcaaacgaacaatgagcagcttaaccaccgccagcatccaacccgtcatcgcccccctcacccgaacagcaatctttctcgttttatcaatcacaaacacctcagccattccaaccatccgctcaactcttgccagcgtctcaagcctagccaaaaatgtcgcctttcgagactccgacgctaacttgacctgcacggtgggaatcggcagctccgtctgggacgaactcaccaacaacctcccgcgacccaaagagctccacccctttcgcgaagttaagggtgccaaacacaccgccatctccactccgggagacctcctttttcacattcgctccgaacgccgcgatatctgtttcgagttcgagcgccagcttatagaccacctcggtgactctgtgcagctcgtcgacgaaacagttgggttccgctactttgacagccgcgatctcctcggctttgtcgatgggactgcgaaccccgtgggcccgggcattctaccgtctgtccttgtcacgatggaggacgatccacacgcccaggatggcagctacattgttgtacagaaatacattcacgacctagctagttggaaaacactaccatcagaacaacaagaggagatcattgggcggaccaagatcgataatattgagcttgacgacgctgaggacgggaagcaggcctcgcacaagacgctgaacacgattgaggacgaatacggcgatgagcatgatattttgcgcgataacatgccctttggatccccagcgagtggagagtttgggacttatttcattgggtataccaggcggctatgggtcattgagaagatgcttgagcggatgttcaaggggcatccgcccgggctgcatgatcggttgctggatttttcgaggccgttgacagggaacgttttctttgcgccgtcggctacggtgttgaatgggcttgatggttgatataaatacactgttgttttccgtcaatctcggatagctagatactaaagaactaaatccaatgagtaggtgaagaggaagtgatttattgtactttccggttccctatttcaaatagagagaacttagcattttacaacaagaactagccatgcaccagagaaagatgttttttcaagatgctgctttagtgggaaggcaggatgatttttgaggtctacatgtttccccatacttgctagctaacctacaaaaagtttggtcttgttttgctgctctcgtcttgtctgctttgccaaactgcccatcgtgaatatccctcttcattgtatatatatcaagtactgtcaccatcgtagcttattgctctacttcgccttacttactccgcgtgattcgtaattcatccttgcatggtgctcatattttagtgacgagtcgtaatgggcttgatatccgtttatgttgcggatacccatggcagtagctatgtcgttttcatccatctattttgcacagttcataatattagttgatcacatattttcgctcacgtagacatatacctgcatcaacatcaaatggagattaacgaagagagcggtgcgactattactagatcgaagtgctgactgtcaaacccaagctgaatatcatagaaatgcgttctatgccatagactctgatcagtcatgaaaagatgctactggatcgagaaagcgaaagtcactgttggagatgaggaatctaggccccatccgccctgtattcaacctgtctagcggactcagctcattgtaccttgaacaagtcagagcttatcacctattgtcttggtatttcattcgatgcctttttccgcctactgcagtaagattgctgagcacaaacacgaataaatgatggatgatcggtcaaatacttacgtttcaccgataaacaacgtccttggatggaaagattagcgttgaatactctcttcaacgcgacgtacgtgcataaaaaggctgctgtagttgtcctcccgtgtttgaaacccaataggggcataagggaagttgaaattatactcgcttcgctaaccggaaacgaattacacctgtccagagcaactttcggcaagccatcctaccatatcggaggaaagtccaattcggcccaactgtactgaaagaaagttatggggcaattactgaaacatataaatctgatcgtccgcaagtggaggtacaagtcgctatgctaatatgatatcggtgagccccactcctatatgaggaaatactacccaccaataatgtccatatatttagacaatcattcgttaattagtacttcctagaatggaatagaatgtaagataaagtaatgaattgctccattttagttgcgtactccgaacgaaacgccagttcagttgtttaacaagagtattataattatggtagatgagaattgctcttgttacatagttgagcagctcacagcaattcagcttcaaagtacaaaggaggcatgaggccatggctcagcaattgcatatgctatgggcattaatacaaaggtacacgatgcgatggaggacgtaggtaaattacaaatgacgaggtgcacgtaataaatataaatttccaaaagtagatgacatggcttttgccttacgctgagaaatgagaggtaagggggcttcgtgagttttgagccctaatttgtttcccctgcaccaagaatctcgatctcactgtccacatagtatggagagcgatggattccccaaatgaaaaggaggtaaacccgctcaatactacggaagatgaaatgaataagcgccatgcttctggtgacctagtatcttctgaatcgatactacactccaatcagcctcatttccagttcgtcgaaagcattgaaaagcctgttgcgcgcagtcatgcaatgaagacatattggagacggaagaagggagagcaacaacaggaagaatacttgaaacccaatcaaccgagtttgcgaccgttgcgaccgttatccaaaccgcgagcagtccacgaacctgagacctctaccctgctttcgccaacagaagaggcttcctccggccatgggtatctctcttgttcagtcaaaagtccagaagagcttgggatccctgaccagcttttcgctaacatcagcttcactttcgcctgtgttttgggccaaaaggttgaagcaaactcatttcagatttcagcacatcatcaccggtttttctatcattgtgagtgcgtttttaatacagcagccttactcagcaacatcaaggagactgacagctcgattttcttatttagggctgagcatgcatgcgcatatcatacattcaggacttcaggcgcggacctttactccattcacagagatttggatgccactcgatctatcaaatgctgcatcattcaatggaatcttggctcatgcagctgcagatctcatgagatttgaaggaggtagaagtaatccggagcttctgaaatacaaaacggaagccatcgaaacaatcaataaatggcttggtgatacagtcaacgcgattacggatgatgtttttgctggtgtcgtgcgacttctcacatttgaggtatgctattttccgcagcttgaagaaggtaacggttgatcgtgccaagagtcctgctttatgctgatcacgcacgaatgaaatattcacgggactaagatggttgttatacgcagagacactggggaacacgtgaacgtttcaacatgcacaaacatggacttcagcagatggtacaggccaggggaggttataaagctttcggtccaaactggaggattcagcttgtcctttccctgtaagtcccctatcatgtccataatctcattcgtcatattgcgactaaagtgtcaggctttctattgttgaaataccggaacagtcatcgtctgtgtcgtacttgatggaggaattcgagaatcttgtatacaagatattagatacttcctacttgcctcatcaatccccaaaccagtctcaccacgccaaacaactcacacacctcgcgtcattggcagaagcgataaaggttttgcaacatcgacggacaacagaggacgtcatgcgtggagagacacggcatcaacgggaagcagtctctaaatgtctgcaatgtttactttttatttgggccacgctccaagaaagtgacgagaggagtattgggaatcagtcgaagcaagagaatagtccttcattcgctctcaatacttttcttcatgcgtcacgacatatgtgggccaagtccgaggatgaagtcatgtcaatcatcttggatgacttcgccaaaagaagggaaaatatggagaaaactgtctttgttacgacggtgattgcatgtatcaaaggtattagtcttagagccctatatggggctgaacagtgcctatcgagctattggaactagccaggggatcaaactcctgaccaggcaattagaatactgaaaatgataatttaaaaacccaatcagaaataaattcaaagaccttgagcgaacaacagcagggtccatttaagggacagtcatggacgctttagctcccttataagccgcaagagaacacatggtggtttcggcaattagatattgcgcagtagctagggcactgaccagagatggcgttaaatatacgacagaaatcgccacagatttggagatagtatgtaggcgtgcatagatggtgttcagacttcagcaaagtcctatcttttgatatcaaatagacgactcgatacattttctacacaccgaattgccaacatcaaatagtgcatttgatgtggttgttctttggctgggcctacttcgcacccgttaaccaccactttgcgggtacgaagacccatagcgctcagggttcaaaccccttttaggaagtattttgatgcctgaacggcctaattagcgctactctttaaactgctctgtccaatgtaatataaatgattcatgtattaatgaagcttttggcaccgtacaatcagattagttgattcgtaatcaggatcatctaaatataatagtacctaagatatcccttaagctctttttaccacttagtcttcggttgcgggtggtggctctaattaatcttcttcgaggagacttatcattgtatctgtgctatacacagaggacattgccttccttcataaggacttgcttttctggctgaagttcataccagatgcctggagaagatgatctcggcgaatacaacagaccaagcttatttctcctcgctagtgtgttcgccactgtattgctctgcgtgttgagtgtggctctggcggtgaaccactgtccttgcttaggaagctagcacgacgaacagcatcatccccgacatcatccaaagtacgcaagagtttaccatttagaccatacatgtgggggctgggtgtgaacaagcgataccacattgaagacgttgctagttttgtgtgcttgtgcaaccttcacatccccagctagagatattggtagactcagcagcggaccttgtcaatgagaaatgttttgattggtccgctatacgagaagaggccgccaaacttggtatgtaataaaagcctttttaggctcaccactgtatctcctgctatattttgcataacagaaagggtccaactcgatgatgaatattttgtcacaaaatgattcatgcgtcggtttggctgaaaccaggaagtgaatgactcgacttccaggaacgggacgctgttatgtatgtaaaagtccactaatagaatctttcctcccccaacttccgcacgaattttatgccgatcctgagatattcacttggcctgggccattaatctccacggtaaaagcattcaaatcgtctccggttatgattccaattttaacaaattctactacaaaggatgaaagcaggcctttagaggaaatagagttactgaaggtataaaatcaaagacgagagaaagctgggtctgtctgatagtttagagcgggtgtctgtaagttattatgaagatacaaactgagaagatgcacgctagatatattatgtatctgctcaatagcgaggggaggacggctcttttctaatttttatacgcattcgcactatatttctactccccctttaggaaagtaacgctataagtctaggcccttttgggaaccggggctcatactgtgaaagcccgctactaagctactaagctcgtgagcctccagaactatactattgagcgctacatgccagttcctttcggaagaattgagtacaattgattcaagaattctaagaacgagggaaaggaaacaatctacggccacgactgggttttatactcttcctggcgacctcgccacaagccaagcaaacaccgtcttcgcttacagttttaggaagggacgactcggtctgcaggtacgaggtcgggggcccaggtttggcaggtacgcagtcggtatcagtcggcagatcgtcagatcgtcacattctataacgatctcatccttatcaaactgtagaaggaattcaataaatgcgggaaaggatctcggagattatagaaggagagggacgatggttataggctttataaagccattaaacaagctctttactagatggtaacagaagggtcgacgttctggaaggttaggatcgatcggtgaggcattttgattggtcaaaaattggtcaaaaaagtcgaaaatgacgtaacaaaactattccctcctcagccgctatgtaagtgcttctcgccatctcttcctcgcaaaagctgatgacccacagatgaatatcacccacagtgatccgagggagacttcgttggtccagatgaaacggtacctgtccggtgacctggagcgcgtgggtcagaaggtgcgccaacgcttggagtccagtcggttggcgcgagggctgctgaaagtgatcggtgtgttggccgtcactatggtgctagctgatggcctgctcacaccagcccagtccgttctcggagccgttcaaggcattgaggttgtgcagccgagcatatccaaaggtacaataatcggtatcactgatgccattctcgttgtgctgtttttttattcagccgttgggaatcacgaaattatccttcgcgttctcaccgatcgtgattatatggctcgggtttaatgcggcgttcgggatatacaacctcactaaatacgacgccggggttttccaggcttttaatcccggcctcgcgttcgaattcttgatccgtaacaagacagacggatggaggatgctaggtggtactttgcttgccttcactggtgtggaagccctctttgcggacctgggcgctttcagccgaagcgcgatccagatcagctggctgtgctacacgtttccgtgcctattgttagcatatatcggtcaggcagcgtatatcagcgtccacccagaggcgtattcaaatccctttttcaacgcggccccacctggaaccatctatccagccttggtcatcgcaattctggctgcaattgtcgcctcgtaggctattattaccgcaaccttccaggtgagagagttgcaacccttgatttgggagaaggtctcactctgacaatgctggcagcttcttgcacaagtgatgaaactctcctatttccctcagatcaaagtcatccatacttctcagatcttccacgggcagcttttcattccgatcgcgaattggctgctaatgatcggaaccatcttgatcgcatcgatctataacaacgtgagtggcctcttcctttccctatttcattcttttccggcgacttatctcatgtcctccagacgacgtccttgggtaatgcgtacggcgtatgcgttatgtttgtgacatttttcgacacctgcatggtttctctggctgcaatgttcgtatggcggatcagcccgtacattgtcctcctcccgtggctcaccgtggcctgcctggacggtacatatctctcttctgcgctgaccaaggtgcctgacggtgcctggttcacgatcgcgctcgctgcaatcctcgccatgctgtttcttttgtggcgatacggcaaagaacagcaatggttcgccgaagccgaggaccgcgtccccactgcacatttcatcgtatccggttcagatggtcaaatgttcctgtccaaacgatacgacgaccttccagtcagcatcacccctggtcttgggatcttcttcgacaaagcgggcgagacgaccccgattgtgttcagccagtttgtgcttaagctcacctctttacctgaggtggttgtattcttccatctccgcccactcgagcaaccttcaatcgcccctgagaatcgatttaccgtgtcgcgtttggccattccaaattgttaccggctgattgttcgatacggatataatgacgagatcatcacacccgacttggcgagcgtaatagtccaccaggtccgggaatatctaacgtcgagcagtgccagcatgcccttagatggggaggatgagggaaaggattctgtgactcctggcaactccacgacggaaggcagtagagacgcccgcgctttcctcggttctgaaattaccattctggaagcggcatattcccacaaagtgctctatattgtaggaaaggagcagatgaaaatcaagcccaacacagcacgcatccgaagagccttgctacttgcgtttctgtggatccgggataacacgagaaacaagatggccaacctccggctgccaatagacaaactgattgaagtcggattcctcaaagagatataagtgtggcgataagcgatctggatgaaaaaaggcgcaggatgttgaagaatcagcttgaatcgccgctgcgacatagtacctccgtgtatctcactagcgaactgtttatattgctttttgtatgacagatagtgttactgttcgcggacggtataaagtacctcttcgttcagcggttgttccaatcttgttgtctccaatttcatcttattcaggctgcctaataggcgcagtcctctcatcaacccaagacaaactgattcagagatatcctgagatccatccaccgcacatatgtttacgttttgcctttcacaaagtcaatagtcaaaatttgaaaatggttagaggtggtgcatcgccaatgtttataccggcacaaggtcacgatttttgcatcgctaaccatggtcaaaggcgagaagcaaacccctagaatatatgttacgtatacctagggggtgacctcggtatgatggcaagaaccaacgttggaaggtggtagagtccacattgggagaccggaggtacatactttccaccattttattggcagcggcccaagtcacatcgccttgatcaatatctggttgtgcctttcttttttcctctctctttttcttctttccatctgtctatcttgacgattttcgactttctatttttcctcttccactcaaactatcttcaagtttacatttgaatcccaggaaaagatgattcgaacggcgacaacgctgagccaagccataaatgaactccgcgctgctaggggcaatatctcatctccgcagttttatcaactgatacacgagcaagatgcgagactcccttccgttcgtctatcattgttaaatgcctctgaagtcgaatacatactgtgcctcgagccggctaagactaatcagggattggattcctttcctacaatcgccccgcccgagttattaagtgagccacaggaatcgcagagggggatctcgctaacttcttgaagtcaaaaatctcgcaatgaccgacgatgctttgaagaacgaaaaaaacgctgaagctagtatgcgctggaggatgaatcacttccttctatttgcatttaacacagcaatggactcgtattctgaagagaaaagacttctggagatccactgtgagcctagatggtcattcggacccgtccgatataaggaccaggccgtgaagctatcaggatacccatcttacgccctatggtacggaaacgaagacgaagccgctttgaatgtcattgtggcccagaatacgaggtttaagcggcatgataagggaattccggaagttctaggatacatgggtgagtacaatgtaccactgatgaagtgctcattaactgatttggtcgaaggtttcgtccatcatcatcgcaagaatgcaaataaattgaattctccggtctatggggttgcaacggactctaaaacgtttcactttgtcaggctggacaataattccacggtatacttattcaatatgtctcacttgattgaagagttacattctaataccttctagtttatcaccgcaacactggactctgaggtagatctagaaaaggtgttcagtctattggttcatatcttgaaagaagcattgatcgtccaatcgactcaaccgaaagagccatctatgcaatctaatcaaggtgaaggatccgtcgatcccctcgtccccgtcgggtcttctcttagacgaaaggttgccaaggagacacaatatgaaaagctgaaagtggccgcagctgctttggatgaggagctcgattattatgacatagatgtgagggacctcgaactcgaatttcccgaagacgagacctctgaagatgagtattctgaagatgactaatgctttgaagttcggctccaaggttgcttccaaggctatcgttaccttttttgctatttgctaaactgggtgagcgtacaataacagtagtcacatcttgtctgatattcacaacaacaagcaattatttaaacatatcctgccttctaggaaaagtgtcttttgcgtagtgtagctatgagaaagtcaagtttattaatatggttgatcctacgccgattcatgatacttggtaaggatgatagacccatctcaagggttgagatccatattcatctcttcggaccccaccccactgtaggtttctgctgaggtctcctttgaatgggctggggagatggtagctgccttccggagcatccataccagcaacccgaacggctgctccagagctgcctgacgaccgacaacagcaaattccgaccactagtagatgttagaattccgagttcctgacgttgggttcttggctgatataaactagctcaccttcgaatcgtgactgatttttagaaaatgccaaactgatccagtatacgccatcccgtaaacaccacagttgcgcttctggtcattcttgcgtccccggtggatacaccctttgataccaattagctttcccaaaaaaagtatgacacatatagcgagatacatacccatatatcccaggagttgggggattggatccttggacttcgctccgcccttagcctcaacgatgaggacgttaaggcacaagccctcgctctcaccataccagacactatagtccattcttcctgagaaaacaacccgcttatgattaagagtcaccgggccgaaagaataggccctctcgcattgaacattcaatggctgggcatttgtgagattcgaagtggcagtcgtgtacgcattgagggtgacagcatcaataaaccaccgagttctagcttcagtgggtcgcgagcgaccaaatgcctgttcaataagagccaatgtggtgactataatgaattagctgtataccccttctactctatgtctgatatcacataccgaggtgggggggtagggcgagcggctgaacattcttcatctccaggtcataggcatcgtattcgagccgaagagacctttcaacctccttcaaggtcaggtctgagactgggacactgtcgtagcgtttcatctggccctcgaccttatcagttgcagtcttcagctgttgtttgtcgatcctctcgtcgaggaacttccggaccgacgatctgagctggcggaggagcttatgacgctcctttggtaaaatctctgtggcgatcattgcttcgccggtggacttctcggcaccaggcacgccctccatacgctcggcactaccgctcatcgttgcagagtggctggtagcgatgtctagtacggtgcaaaaaattggagtgatggaagtggaagatgcaggatgagaggagagttgatatgggaagaaagaagaaggaaagtactctagaaaaaaagtaaggtttcagccttgtgggcagcgggtgatggaccaagggtccacggatatcactaatctggtgcggaccggtatttcctttcctctttattttctttccagctctcgctgtgttctctctttgattcaattttcaagtcttcaagggagactcattcaagctaccaaaaggcaaaccaccttatcgcttcttattccctatgttctcaaccagaatggcagagtaagacccttctccattaccagctgcccgtaaacgaccactcgaggtggtggcgcatacgaattatagtttgttgagcgtagacgacgcaaattccgtctgaatctaacgtactatggcttacagccggcttctatactgtaatgaccctaatacggtccagatttgacttatggcctgcagccggctttcgtttcccgtggcggaccgtatacggtctgaatttaacttgcgaataccagaccgaggttatgttaatgaaagaccaaagaaagtggttctagaacaaagaataggtgcgaatgtggtagaatgctagtttctttgatggttgtaaggcggccgcgactgaaagaatgtggatgaccacagtagataggatttactttacttcctaaaccgaaagcgaagttaatgtttgcatggtttgcaacagggtcgccaggaagtgcatgaaacccagtcgcggccgtagaatgttttctcttttcctttttccttccttatacccagaatccttaattgactatacgaacgggcacgcaatacccactctatagaccccgaaaatcctttttataaacctaaaccgcctatcgcactcggtactataagtataggtaatatgtcaagtacccacactaatatataggagccagtttgattgctaacgggccgtgatctatagatggagatggaatggtggacacgacgggaatcagggccgtccacggatccccgatatttcggtcggagatgacgacagtcaggatacgccagacgcatgggcacatcatattatgagtttcccatggacgactcctgctggtgtaaacatcgtcaagggcgcgacagtctaggtcctccatcgaaagaatttccgggacaacacgcctggtagtcaccccatgtcgctttttgtgtacattggttatcgccggtctcgtatgtgtcatctcgacgaatagcgtatccctttacatattcctcggacattgttgagacacgattgacgcgagcttagaatcaacggtaaagggatgcggggtggaatcggcctggcaggagtgttgcgatggggaaacaacattatttattacggtcctggcaagactgctgaaagtgggtatgcttccgggtcgaaatcttaaaagactgggtcttcgcccgttatttgaggccagttacattccccgtttcgacggttcaatccagctctctatcaagctagacatctataagtgattgatctctctccctatgccatattttgtcccaaatttcgctccatcacttgatactggctgcctcattttttgaaatccatgcaagttcctgccgatttgagtattaatataccaggaagggaattcaggtgccaatagtcctaccaattgcacaagctcccgaacagcctgttccatataatccaaacttttgacagtagagatttccatagccgtaataagactaacgagcagtctttgatccttttcctcgaggtgataatccatttcaatctcgcatttcaatctaccaacatgtgatcgtaggcatttcctgatctccattcgtaccgatgtgttcttagcaacctcatcaattaattcagatgcctgaaccctttgtttcaattggttcgctcgctgatatattttaacctcagttggttatggctttagattgcttttgaaaggattcagcggctcaccatttcatagatttctgcaacagcaaccgggcagacatcatcccatttgctcttgagatgcttcagaaaaaggtcgaaaatgtcgaactctgagcgaggaatacaaccatttggaagtctgctacccggaaagctgctaaggaagacatcggcctttcctttcgagtctggactcctgacccatgcgataccgcatggctctgggcactgctcgtcgtttccggggatatgttaatatttggccgggaacgcaattgatacgtaagttatctcggtttcgagaaagtttttgccgatgtattgaacgtattgtgatttgccaagttcaaatttcatgtcacattcggcattgaactgtcttggtacacgagaccaaatttcgtgctgtgcacacacactgtatcaaagttagaatatagaacgaagaccccaattctttactcagtataatgttcgccgcccttcacgtgggagcaagtcatacttgggctttaggattggctgctaatcaaagtgatagtcaggaatgtattgattgatttgcacccagtaggtatcctcgtttccaagtttaagccagtcacttgaccgcatgtattcaagtgtagacattgagcttagtagcttcctcacaatgctctcgtttttttgatgtagagcgtattgtaaaggtgttcgtccagttcggtcttggcagtccagcaatggcccctctattttatcttccatcaatatattaaccagcctctcatgttgatggaagcacgtaaggtgcaaaggcctggttccttcgtaatcgcacctatccaaaatccagggatcaacctctttgccccaaagaacaagctttctaaacgtattcaacaatttttctagcccgtattccttttcataagtttctgaatggcgaattaagtagttcaacgagaggtctttgattttcttttgtgccatcaagcccacgacattctggtggttcttctctactgcccataacatcggagttcttgcgaaagtcccgtcggtttgatcggtccgatttggatcaacgtctttgtttgccaagagatattccacgatttgactgtcgccgaattgagcagcccaagagagccagatgcgtccaaatttatcccggcggtctggtaggagaagggagtctactaacttggcgaggtcgtggcgaggaaccattcgattttgtggtgtaagatcgattggcatactgataccatgatctaatctagctttaagaagccaccaaaagcctgtatgctggtcgccaccctctttatgtgggtcagctcgatagtcaagaagcaactgcatgatcaccacacgcgacttgcccgcggcaagtgagaaaggagttcgccctcgtgcgtattgatccacgttgacgatggaattctttgattccagtagctgtctcacggactcgacgtccgattgaataactgcgttgatgagaggggtgttgccttcacaatctgctagatcaagatcggcatctcgttcaataagaagaccgataatgtctttttttggcctcggaggggcctggactcactgccattgacaaaggcgttcgaccataggcgtctcggtggttgactttagctgcatttgccagaaggtactgaacgattttggtagacccaatagaaactgctcgttgtagcggagtaggatcaagaccatcatctggattgatcattgcattctcttgctctacaagaaatctcacggtctctaggtgaccaagttcgactgcacgtgatagtggagttcgaccctcactgtcccgccactccaccagggccccagctttctttaggagctttattgtttggggctgtcgtgattccaccgccaaaaagatagctgttctgcccttcgggtcggatagatttaggtctgttgtctttctttttaaaaatttgtcgatagtttccggtcgcatcgtggcttgccacaagggagattgtgatatctcgccgtcgcaaaagttcacgttaaaatcgtcacatttcaaaaatgcttctattcgttcgagtatttcgttctgccaatattgcagggccttcacattcttctctccttttcgctttcgcggttctctttggagtgtattcaaaaattctgccttcagagtgtcaaaagattccagaggaagggaatcactggtcggtttttcagtcatatttgtcgtagactgtggttctgatatcacaagcaagcaatagggacgaagtttggtcttggaatttagcgatatccttgaaaattctttttttttcaacctgcaaaaggtcacaaatttaataaattcccttaagctgagtagccaaaaataacatgcatggcccccatatgtgttaacaacttgcatgttatccaatgaaagagttatgttccgatggcacacttagtcgcccggagttcactaataactcattcggcaataagcagggtgaaatctaggtgagaattacccaagtcgcgcgaccaccgcgttggcccccttagctgtacatccacatatcggatattggatgaaggaaagacatattattggctacatgaaacaatatgaaagtggatctgtggcagatgactaattttgtttacttttgaccctttgggctttcctgtgcgtggatctataaagagccaacatcgcttaacatggggctcaaatcttggataatgtatcctccatcaccaccttaattagaactcccactcactgctgtctagagcccaattaatcttgtgaggggggtttgccaagccgtacagaacgtaatatgagtcagaccatgtctttgggggggagagaaactcagccgcgctgaaaccgcacatttggctagggaacaacagaaattagcacataccctatagtaccaccgtgggaatggaaaatcactcacattgacccagatacctgatcatagatcaggtttgttgtcgtagcgggggttcggctcgattccacatggcagaaactgtcttctcaataagtcagctccaatatcactgaaaggagagtgataacaaactcattgactcggcgaaactctcgacgaatgtcatcgcgagcgtcacgatctaggctccagaaatactcatccgaaagagactctccaggcaccttgtcccatacaatacagacagaaaatccccccgggaccgcatcgtcgttcccttgttgtgcctctttgtagcccaggagggcggaagtaacattacatgccatggacttgagcctttgaaatgcctttagtccagtgggtatatatatcggaatagcttggagtgctctggttttgggcttagtgtactccgtgccgatggttgggatctgacggtggattctcatgaacgcaagcttttgagtcaagtagtcctttcggtagcaaagaaactttgccatagtttaaacagggccatgacgctcaacttccttctggctcatcagaagggctgattcctcgagatgttgggtgatgatccatgtttgggcaggcaacgagacatatggatcggcatctgttgtgatctcactgccttctaggctagccagaaacggggttgtgacctggtgcatgacaggctgatatatctttgcgaaacagagcgaaagtttgttgaaatgtaggcgcggaattggagagaatttgagaaataaaaaagatgatcaatgagtgaccacaggactgaagtggaagccttaggcttcaggctttacttctgtttacatttttctcttcctctttcctcttctttttctggataacctttttgtttcaattgattgttccaacaaaaacctgtgagtcgcactgcgattgtaaattgatgcattattttggaggtagtatgtgtatactgacgtcatattgcctatactagaatataccacactgagcactccccactgtggagtatggagtatataagcttatgttttgaaagaattgggttaggcgttacctcgtgattgattgttaacaagcggccaagggacggcggcttcaaaagtggggttctctttattacccgtcgaccttgccagcaagggtgcgttttggtcacaactcacggccagagaggaagattaagacatttattgtgggtacaagtccctgcgaagacatcggagctcgagcagaaatgagtttgttttcaaaactcgcaaatcatgcgctggacttcacctccgtcgccaaaagccatctccttttcttcaatggcggagattcaggctccgtccggggtcatagcgcggggtagtgcccgtccggggtaaaactcgccgagcccatagcccgcggatgagatgacaccgagacgtgtcctactctgggattcgtcaggttctttaaagatcgatattatttatcttggatcctacacgtccaatcgccacccagaccatgttctacagacatagagagatcaagcatcatgagcatccaacttcgtgttcggaggccagccgtcgaagacactctgaatgggtcacgttgctgaacatttgcccgtgtccaggtggtactatatatgtggagccaagcatagcgctaactaataattagagcttacgagtaacctctcctagctcgtcggttaaattccaaggtttactcgctcattatgataggctcgacagaggatcaggagggtcggatttcagagtggacaacaaggaaaaccctgggacgggacacaggcatgactcgcactgactgaacgcgggaggattctggactctcccctaagatccaaaggaggatattctccggcgaatagaacgccacatctagacgcacaccaccacatttcagcataccccgcaaatgcaccagtaaatttcctccccgctattacctatcagggcgagtacatatcagatcacttcgcttgacaagaacccgccataatcaagtgacgctactaccgtagtgccgggggaaatgaccctcatgaatagagatgtcggcttgtggaggtcaaggtccggagaaagcttcacccaattaagctaagatcgggaccataatcacgagcatgtcgtcgcgggtataaagatctgagacccccagtcgtgcctgcctctcttccattcacccgtttccccagaaatcgtcaatatgaatagcgacatcacagagaaggagacctcagcgttagaggtcgaggcaacgaattttatatacaacgaagttcgtagtaaagagggaatttcgttattactatggcggattaattggtaggccggaattatttcgtttaaaccagatattcgttataaccaggttcgttataaacaggttttactgtactcagatggaaagatgtctgcgttgctatctaactatgcctcgggagtgcttttaatcacatggccgcttagtcatcctgatctagaaaccccgcagcaatatgtatctatcctctttcttgaatatttcacacatctagaactccataaattatctctcgcaatggttaaagttctcttgactggtatgtgattttgacttaccctcgagcccaagctaactatctactttaggaggcagtggcttcatcgccgcccacatcattgacattcttctacaacatgggtatgcgttagccaacatgaaaatacagagtattggttgacagttttactctagttttgatacagttgttactgtcagatcggaggagaagggtaaacgcattattgaggcccaccccgatgtgtcgaaggagaaactctcttatgtgattgtcaacgatgtagctaaggatggtgcatttgatgaggttagtagaacatcgtgcccctgatagatacacaactaacggaaaaacaacaggccgtcaagtcagaccctccctttgactatgtgctccataccgcatctcctttccattttaatgttcaggaccccgtgaaagacttccttgatccagccatcaagggaaccactggtattttgaaggcaatcaaggaatatgctcctaccgtgaagcgagtggtaatcacgtcatcattcgctgctattgtgaatggcaagcagcaccccaaggtctacagtgagaaagaatggaatccagtgacatgggaggaggcgttggaccactcgcaagtttaccgtgctagtaaggtaagtgatactggacggtcagcctgagtaaatgcaagtgctaagtcagttccataccagacctttgcggagaaagcagcctgggcctttgttgagaaggagaagccgaatttcgatattgctaccatcaatccgccactagtatttggcccgatagttcattatctcaactcccttgaggctatcaacacctcgaaccagcgcatcagaaacctcatccagggtcaaatgaaggagaaaatagccccaacgggcacttttctctgggtggacgtgcgtgatgtggccctcgcacatgtcagagccatcgaagtccccgaagcaggaggcgagagattctttgtcaccgctggcttcttctcgaacaaggaacttgcggatattgctcgcgagacccatcccgagttagagtctaagctgccccctgcagacgctcccagcgacttcccgaaaaacatctatcagattgacaacagtaaatcgcaaaagatccttggactcgagtaccgcccactaaagcagacagtctcagacaccatcgattctcttctagccgtcggtgcttaaactcatttcatagatccagattgaattgatggatacattatgagagaacaaatcaaacattcttcttttacaacaacgtatatgagagcaatttcaagcaataaattccatcaagtgccacgcgtcttacatcttataataataaacatgagagttacatcctatagatacaaaactgtgggttaactacagaacggcggtctcggtcgttgtcgcgcaccgtaccgctttggcccgtgttctccggtcaacttttctcgcgccagctatccaagatcacatagtcaatccactgaacaagatggcctccgccaggctatcgccaacggcgaacttgctacgaaactcgcgtttgttcgcactccctaaaactctcaagggccgtagtggccaaacgtcgagagaatccgacaccgcgactctgcattatcccattcgagcctccatcgttacaccgcaatcatcactagcccgaggcgattggggattgaaacgaccgttaccggctaagtcaacatcagagaaatcatcgaggcctgtcgttagagtacacgctctcgatacatatgaacatgtcaccgacttcgaatccgccgcagatcacaccgtcaccctcgagaagttccaggagctgcacatgcctatgtctctcccctccaaagtcaattacgctacaagtgttgtgccaagacatcaaagtccgttcgaagcgcatctcgataacaccgagaccagccagggtctccaggaacctggtgccaagcaattcagacacaccggcccttggcttgccggacagacggagtcagagttcgcagcgtacttgaagcaagtgactcgcaataagcctgagctcctgaagaagcttcgtgaacagtttgttgctaagcggtctgctgagatccggaaactggcacaggataatggagaagacttggaagctcaccccgcaactgtcaccgatgcggagttcaatgcctacattaaaactctgcgcaatgacccattcgctctcggtcccgtggtctatgagctgcttgatctcgcttccccccctgccgttcccagcgagcgtatcgggcgcaagtactatcaatctcctggaagcaagttgtcctcattcgaatacgccgtctcaggacccccgaagacacacccgtctggtggtctgtcatacacacgatcacacgcgctgattcacaaccatgcccagtttggcccacaagcccaccagcgccccgtggaggctcgtatcttgcgccctaagggccgctttaagggacgcatggcgcgtgccctcgcgggtattggtggtattgctgtcgaagatttgaatgccatgacctttgtggagcaaggcacaccccccggtctgactttcttcgatgcgtccatccctggaggaggtaaatactgggttactcctatccgggcttcggttgactccgacggccgcattggcctttcatcttatcgcgcgagtgcaaccgccaaggctccttacggcatcgaagactaccacaagccgactactttgactatctccgatgttgccactgccccatccccgttggtcccgagattggacagactgccactcggtcagcctcggttccagccttccgcggagaaccgaccccggaggcaacccacgagggggacagaggatgtcgcacgcagccttcttaacaaccttaactctaagtcataggggaaagtgaagttttatgaggatgtgcaagggattgtaccatgtatgatagatttggtgcttgtgtaaagctattttcgttttcttttctgattatgtcatatataaggtgcatcaatatcaagttatttcgacagcggtaaaacaaccagacaatagattcaataattgtacgtatacttgaggatgtacttttgatttgtttcctacctttggatatcgcgaaggattacataatcagataagatacgtaagccacgtgactgcttgattagggccggcctagggcaatgacccacacaggactaagcgaaacccgatttctcaaacccatccaaatcagcacgactactctggatctttcgaacattcattccgccagccaacaaccgccaaaatgggtcgcgtccgtaccaagacagtcaagcgctccgctaaggtcatcatcgagcgttactaccccaagttgaccctcgacttcgagaccaacaagcgtatctgtgatgagatcgccatcattgcctccaagcgtcttcgcaacaaggtgagattatatacattggcaccaacaactcgagatctccaattctgatccgaaatctcttctagatcgctggttacactacccacttgatgaagcgcatccagcgtggtcccgtccgcggtatctccttcaagcttcaggaggaggagcgtgagcgcaaggatcagtacgttcctgaggtctctgctctcgacgtctcccagaccgagtccggccagcttgacgttgacgccgacaccaaggaccttctcaagtccatgggcgtaagtttccactgcacactacgatgcgttggcatatttctaatttacctctacagttcgacaacctcaaggtcaacgttgttgccgtcagccagcagcagcaggtcgagcgcccccgtcgtttcggtccccgctaaatccagcgcccggaataacgaaaaaaacaaaagttcatacctggccttcggtcgacccttggcggtacccaaatgtctgttctggctggcttttcgctcggctagcatggtttagcttagtgtggagggctattcctggatgaggaatgaataaacatgattctctttgagaaaggtgtcgctgattctccgaaaggagatgacgcttgattgccaattttccttcctcgtgtctacctacccatgagtttactctctggtttggacctacgtaggagttcttggactgggggttacctcagtccgagagactcgagacttttggtggtttgagtcatgcctggatttatacgtacatattctatatatgtacgagtcctgctggccagcctatagccatacatatggtctctgtagattgttcattactcatgcgtcaatgtcaacattgatcgggtattaataagtagaacgccgaaaatccccttcgaaatcccatagcagcattgctatcctcagatccgatcgagcaaatctatgtctccatcttgatcgacgtctcgtcgctccctgggcacgtatccttcaatggaaccgccccttgcatcctccggtcgcatctgtggagcggcagccacctgctgagaaccacgttgattctctctaatatcaacgttaacacgtccatccggacgaatcaagctggtatcgccgcgttccaacgcaagctcccgggaccgattgcgattcccaagtcccatgctctgtaaatcatccacaacggatgagatactgctagtagcggcgggtgccttcaagcgcttggcgcgagcttcctcgagtaatagaatagacgtgccccgcgtatcgcccgcccgtcgttcccacacaggcttctcagatagctgcacccggatccaaagagctcgctctgcgcatgcatccgagcaccacttttcgatgcggtcctgtgaaacaatctccacgctgcgtccacgccctcctggcccacttcctttaggaccgtatttaaactggaacccgcctcgcgggccgttgtcttgcttgcgatgcttgtggggacatagagcatacccgcacaagtcttcgaagtttcgctccaggatcagattgtcgtagtcgctggggcgaaatggggctagcgaatatttgagttttacagcatcttcttgcgacggcgcggctgggtccgctgtcggagaagaggggagctcgaggagctcaaggatgcggttaaggatgacatcttcggcatccttttgggtctgaatctgctgcgcgtgttccagtgcgacttcgaggtgctgctgggtcgcaccgggcctaccttctaggtatttgtcttgctcttcttgtgtagggtataggtatgaaggtgggggtcgctgggcattgatcgcggcatatgtctcgggaagagaggtcttgagagcgtgacttggcccttggtgtgccatggttcttaactgaggcccctggaggataagccaagggtagtttaaattgaagatgggttgagttgggaagtgagaggaaatagaaaaaataaaatcagcagaattcgactccaaagcggaagaggcaaaaccccggattgacccccaatgggaggagggacactttgactgctgacgtaggctttgggcatccaggatatgtatggatgtgtggaggttttatgcttgctatttgacatcgcataacttgtagatattgacatatggtatcctacaatatgcattatatacatactcggtacagtctacatatggaatatttctctcgacctaggtagttatatagcttcgacgtcaatagcctagctacataccaaactatttaacgtacatcacctaaaaacaagctgaatacccacatatatctagaatcggtataaattcccttggtatttcaacacatctaggcattttcccccatgtgcgtgttccttggttgatgtgttaagccgccgatcgtccagtggagcccatttccctcatcccgccaagtgacgaccacctcgctgctccgtacatcctcctcccctactactttttttttgtctttccgaccgtgttccttttttctcatcttgcatcaattctctactggccccggctacggtgttcggttctccacgccgtgagtgtttccgcagtcccccctccccccctcatctcccccgtaggcatccactcactgacgtccgtttcatctaagctgacacgccttcgtaccacaaaggaattgattcgtttcgccttaaatattgctgcatgctaaaggcattgaagccggcgattcgctctgtacagatattctagcatcattgcgtcacagactcgttcagcattcctcactccacaccgattgtcctaaggcctgaacatcggtctcggcttgccagatgtcagttccgcccttcacggtccgctcggtcttcgagtacgcgtcgggccacgatgatgacctcaacttcccgatcggtcaaatcgtgaccgtcaccgccctggaggacgacgattggtactacggtgaatactcagacgcccagggggccagacaggagggcatcttcccgaaaaacttcgttgaaaaatatgagcctccggcccctccgaggccatctcgacccaggcccaaaaaggagcccgagacgttgccagtggagtctcccgtggtcgaaagcaagcaggctgagcgcgagcccgagcccgcggtgcagcctacagaggaagattatgggattcaatcttcgcagccactgccccagtcccctcgtctacatgcgagtgcccctgtatcagaagttgtatcctcgcccccgcagccagcaaaggcgcccgctcccgcccatcccgtggccccaaccgaatccgcagccaaagcaccctcaaaacctgcgcctccggctgtagcggataagccctcggggtcatcattcagggatcgtattgctgccttcaataaacctgccgctgcaccggttacgccattcaaacccggtggttcccagccatccttcgtcaagaagcctttcgtcgcaccacctcctagccgggatgcctataagcctccaccaagggaacctgcgcccaagatctataaacgagaggaggatccagatgtgaaggaacaaattgcccgcgagcctccggtttctgaaagccggcctgcccatattgaaggtggcgaagagggagcagaggaccagcctaagccaactagtctgaaagaccgaattgctttgcttcagaagcagcaattagagcaagctcaacgtcatgcagaggcagctcagaagaaagaaaaaccctctcgccctcccaagaagtcgatggacgaacccgtggctcccgcagtcctcgacgaggtacaggaacctccctccgttgaagaaccaccggctactcgcgatactagtgttgatacattgagggctgcggcccctccttcacagccccctgccccattctcacccacccaggaagtcgcgagtgacgccaatgatgccgactactccgctgctgcagactccgaggatgccggcgaaacatccaccagcaaggacgatgaggaagatcaggctcaaccgcgtccagtttctcgtcgtcaaccgttgactcatgcagtcgaacaaactgccgaggcagatgttgaagacgagggcgatgcagaggaagaggaagaggaggaaatggaccctgaaactaaacgcagaatggagttgcgtgagcgaatggccaagatgagcggaggaatgggcatgatgggtctcttcggcccgcctatcggaggtatgccaggtatgccaggtatggctagtgccggtagtgctcgcaagcccaagactcccgtcgagtcagagaagcggcttggagagctcgaatctgagcccacttcccctgccaatgcgccccctgtccctatgatcccacttcctgggatgaacgcggctagcaagccggtaccttcttatactgaggtggagaaggaagaggaggagcctttggcaactcctctcactgaacaacaccccgcacgcgatgtgccagacgtcgaggaggtcgtccacgaaggtgcactgcctcgtacctctattgaccgtccggccccggctccaccatctcaaggtaaattattctccagcagtctgatgcatggttccaattcctgatagtcgcagatcgttccgcgcctcctccgcctcaccgagagtcaaggcccgtcccgacagttccagtcgagccaccggcttcacctccgccagttcctgctggtaagtacccagatccggaagcaaattatacgacctgggcattaacgatgatatacaggtcgaccagctcctcctctaccacggcccacaactgccgacaagggcgaagagtctgatgatgaattgtcggtgcacacatctactctgtcgttgaataattcgcctgctccaccacccgtgcctacacatgcggttcatgaacatattgactctcgccgatcttcaatatacgaccctatgccctctacggcttcgacccccgcggctgaaaagagagctagtcgtctaccaccccctattccagtcaatccgccaatgccaccatcggcgcagggccgcgctccccctcccctgccttctgaccagcttcgtcgccgatctaccgtcgacagtcgcacgagtgcgttatctgctcctcgacaggctggagaagaagcggaaggagaggtgactgaatatgatggagactatgacacagatatcgcatcgggtgtgaaacacaaggatgctctgaaagcccacgagcgtgaatccagctttgacgagggtattttcaccgacgactattccatccagtctccgcgcagcccccaggaatcccggcatcatcacctacctcctcctccacccacggctcccagagcagttccgcctccaccgccaagccagccgccccggaatgcacgtgcgtctatcgacacacctaggggaccgccgccccctccgccggacagagagccaaacagcgatgatgatgttgaatatgaccctttcaactacgctgctccccgacatggtcttccggcgtctccacccgtcccagtcggtcgcccagggccgcctcctcctttcccaacacaagcggccgatgaatttgacgatctatatgatgcccctcctgtgcaaagcccagtaagagaaaggagtgataagcgcctttcactggcgcttccccaaggccaggcttcgggtttgccatccccgtccgcagctcgaacccagcgcgcatctgtggatattctaagaagtcagcccaatcttcgccgatctatggatgtttctcgcccatctattgaccaaggctacatcgccaccgatgttgatttcgccgcgtataccctctggtggactaaacccaagacaccgcctccagctttccagaaccgcactgatctgcttttcgaggtcgaggagactgcatctacgaaccgcagtggcaaaacgacagtctctaaggacgtctatattctattcatcgattactctcagacagtgttgaatgtccagttcgatcccaagaaccccaaggatgcttccttcgagcagcgccatgaacccccaccgctcccgtctcgccaggatcagctcgagcaggctcacattcagcttggaacccgaatctcggaagccgtcaactcggtccaaaactctaccgttggagacggcactccgttcggattggtccagcacctgctcagtcctctttccgacgcgctacttccggtggggacccgcgcttacggtgcctcggtttattcaaacctggccaatgcctccgtgtctcagaacgatgaaatccgcgctggtgacattgtcagcttccgcaatgcccgattccagggtcaccgcggtactatgcaccagaagtacagcgccgaggttggaagacccgaccacgtcggcatcgtggtcgattgggatggcacgaagaagaagatccgagcctgggagcaaggccgcgagagcaagaaggtcaaaatggagagctttaagctcaacgacctccgtagtggtgaatgcaaggtctggcgagtgatgccccgtagctgggtgggctgggaagccagtaagtaacaggatggtcttttttgttgctgtgattgcgctatgagcagacgaccctttcttttgtgtttttgcttgccccttctagattgggtgagatcatgtatgaatgaaaaggtacctcctttctcccctgtcttctatattcttctccctcttctcttgtcttttcctgtcctgctcccctctcgcgaatcatgtggacttggtgtggtaatgtgagatgggaaacggtggtccctatgtgatggagagttgagcgagcgtgcagcttttcgtttttttttttgttaatggtacatcttgcatgattctatcccccgcaaactatgagatactattctcgaatttctgatgtataagtggtcatgtcttgattcgtagataagttgccatgtagggaaattgtacatgctgcttaggccaacgatgacgacaatatatctccttaggggtcgtctccggtaccgagcacggaatagtcaagtttgtactttgcacgagtgaggataatgctcacctgcgttctagacctcgacgcccccgtctgaaataaattaagactaggattctagcgagctaacaaagttttctctaattaacggatcgaaattcgatgacggacaccaaacccaattgccgactccacctgagaccaattcatactccgtatgaccgtcagccgagttaaaacagtgcgtcaaacttggcctaacccacaaccaggcacaaacctacaatattgaatcgatcttgagcaccgtacggagcacagtggcgaggaatcaccaggtgagcaatgagcggatcagccgtggtcatacgactatggcagattctaactattgcttcatgaagaccgtcgagagagaccgggggctgccccggtcccggcaacccctcttcactaacagtggatgggggaggagggcctccaattataatgctcgtttcgttttttttttgttgagtttccaccggtttggtgttggcatgttcggtggagagtccctcgttggtggaagcccctggatctccggctagtactccggatattgatattcgcgatcggggtttctcgattccgagttgatcgtgggtttctaatattggattatcgggatctcgttggtttcgatgcattctggaagtatagcacgtagatagatgcaaggtgacaatatccagtggtactcgggagtgtagtgtatggctgataaccaggacttttgcccgggaattttgttttctctaaaaatgaaaccgaaaaattcggccacgagggattggccccgcggattgctccgttagttaagacccggttggcggatgctttccggtacgttatcgatgtctttcgatgctccggatactccgtacggagtgctccctagtattattggattgacggtgatgacatcaatgcaatcaaagctacggagtagatatcatatttatgatacatacataacttggaagtggttaacagcgctcgaaatgtacaagaaaaaacaagatcccgagttaaattagtatccagattcggactagtcaggggcactacaccaacttccctagggctaatgattcgaatcacgcctatcggaaggtggaaaagcttgtaggcggggctttcccaaacggctgtcaagcctaccggccaagacgcacctggggacgcgctaaagaagtttgctcctttttattttattctaggctttggggatgttcttcggttccacacagatcggatgaattcctaatatcaacagacccctatcataaatagttgctgggtcgagtggagatggacttggactctatcgtggcatctaccatggttcagctcttgctgctaacattgctgttgatccacaaccattactagttagttacatgtagtggtggtgatggtgtagaggatgtcggaaatccaacatacatagcctcatcagatgcagcgaatgccttgtcatgcacgctggtcctgcagagtcggaacattcatgagttcgttaggttttggcctatcttgtgtcattgttgtaccactggtaccttatattgtggctgaccattgtttttcaaagcaagtcatattttcaatatattgctctatgggcatagtgcagattaagatcgcgacgaactcccatgtatcttccaactttattgcatgttgtacggggtacgggagtatggcatgtctgattagtgggattactagagagttacaaccaatgaatttcccttgctgccggcttcctaagtaaggagtttcacattatacagtatgtatactgtgactcgatcctatttctcgattctgatatgagagattggacggatgaactactccggaccgtgaccaccttccacattcaaaatcctgctcccaaactgtgaaatgaagtaatggggcgacgatcttggtgtttcccgtgtccaggcccccgggaccccctagcgaatgggtgtttttcattgcttcattacggagtcccccgatgtcataagaacattggaaataacatcgcacacacaccaccgaattgcatgtttcgaaccagaattggccacatcgacatgtccaatctcgcagtcatcagggtggcgctcagccccaggttccacattccggaagcgagaccagaaggaagaggacagagggaaaaggaaagaagagggggatgtgatcctgaacattttatttttttatcttacgcaaggggggtgaaatggatgacggtaagtttgggcagtggctacctgatgttgagcggagtctacactggtcgcctaagtatccataccataccgtacctgcatcggaccatggatgcaggctcgggaagccccttggggcatggacagtgcaggcaatgcaggtctgctgaaacagtaaataaacagagaatatagatcgtatataacattctatatcgctaccgagagatccaaggaatataaccattagaataaagaacacgaacggtacttaattttgatccgctggtggacaccccatttgagacgatcatctagatcttatttttttttctcttggtaatatcgtatgccgctaagggccctggacagttacagttctggatccattccaaatctccccctcccatcgcattcttcgcgtcaatttccccagtcattctttcttttcgacctatttccttctcgacggactctgcagcatattgcgtcccgtttctctcatgctgtgatctgtcaatccccgctaattactctgattggtctggcacccggaccattcacggtacacggcgtgaactcggtattcctggcgcttcttctcttcaggggacgtctctctctccctgacctccatctgcacttgttgttgcacttgaaggtcatgccgctcatttcattctctggataaggacatccattgagtcactttgaccgcattgagccaacccgggacactgatcgtcgctgaagctactactacactctcggatttatcgacattcactcaacccaatcgtaaaattatcgaagcgcattcattcctttccaattacgaggtggcccctgagcacctcgagcatcccgatgatgaaccgattccgcaaacacaagaaggcgaaggaggccgcggaggaagaagcgacatcgccaggattcagcctaaaatcatcgaagaagaaggtggtcgaaccggaacccaaactagatttcgacctatcagccgcactcccgccgacagacaacttccgcaccagtctgctaatgcccaagttgtccgctcgatttagcatgctcaaggaacaggacgacccactctcaatgctaggcaaggctagtgatgatagcgttctatttcccaagcgcgcttcccgactcaatttgttcggtcacaaccccgccatgctgacagacattgacgaagtttgctccaatgacggtagccgaccatcctttgcacttgaccgcacttctttcgcttccggtggggacggctatggtacggacgacgatcgatcccaaacgggcagtatgatgagcagagcccgtcccgccgagggcaataatctgtttggaggtcgccaaaagatttataagattccggtcagatcgccagcggcaacaacccccgatacgcccgacgctggtcgctggggaatgggaaagccggtctatgagcatgacttgaacctatctgcgtttcagcgattgcgtctcaaggagaaggaagagagagcggaggccgcggctgcccgggaatctggatatgccgcctcaactgcttcatctaacagccgactcacatactcctccaccgcatctggaccactgtcaacagtcccaacatcaactgtaggaacctccgccgacgagtcaccgttgaccacgtcccaagccccagcgacgggctatccgttccccgaaaccctccctgaggactctcgacccggtcctggccccatgtctggcccgcgcaatggctcggttcggagccgtcgtctctacggacaaggattgacacaggctgctcagagccagcagagctcgactttgaaccgcctagagagtctgagtcgccagcgtgctggcactccagatattccctctttgaaccgtaacttctccaaaagtgccaccaacctaagggaccacctgaagcttgcgattgtcgagccggcttctaccacaggcccgactagccctcctccatctgcaacatcatcaaagccacgaatgtccggagaagccgggttcaaagaccatctctcgcctagcacagcaacgtttggggctcctcccctgagccctcccacaagcgagaacaacgacgttccctcactgttggctgcctcaattaacccagatgatcatggaaaggctaccgctatgggcttgttccaccggcctgccactggttttgacgagcaggcattctcccgccgccaacttcaaatgcaccaaggccgagagaccccgccccctcgccgcgcatcgcctccgcgccgacctctaccggctgaacccgtgggccgtgctcggggactgtcgaagtctagctatcgttccacagcagagtcggcctcatctcactatagcatcgatccttcctccagcgttgaggcttctcccttcagacctggagtgaggactttctatgctaactcaagtgccagcgagtctggtgatgacggagagagaccttcctcgcgtgaactgtcatctctggctagcgagtacggtccgccgcttcagcagtccagtgtgggatctaacaagccatcaacttccacaaaggatcatctcgaaacgcttcccgaagtgagatactccgacctaggtgatcttagacctattgacgaggacggccttgacttcacaatttcttcccccgtagtcagcgataacacacccaaacgacctgactcaccaaccctggaaccagatcaaggctttggtggaatggggggactggttcgatctcacctacgccaggaaagtgagatgtcttctatcttccctcctccttcacctcgctcgtcagagcaccaaaatgacaaactttttcctaagaccgggaccccccagccaccgaacggtcttcctacgataacacaaacccgtgatgaaagtcggtcatcatcaagaacccgcccaggaacatcgagctcgcgatctccttctggacattctgtcgaaggtgcaggttctcgaaacagcgcagggtcatccgcacctggaactattgccgacacacctttatcgaacggcccgtcctggagggaggaattagaacttcatcatcgccgtcatggcagcaccgagacccaaagggaacgagaggaattcgccatcgagctggcagagagacgtagaaaggtgcaggagaagctgcgtagtgtcgctgagaacgaaagccgatccagcagccccaacccgggccgctcaaccccagaattctcccgggctggtaacgcatttgccatgttgaagcaaaagtctagtaaacaagctagcacaaagccggatcagaagaagttgtttggttatgttggtggcaactcgtctacgcctgctctctcagatggctcgtggcgcgaagaggagcgaccctctttcagcttcggccagcaccccaactccagctctccccacattggatcagagcgttcgatccgttctcgtatgccatctatcagccgcgacaacagctacgaagaatcacgcgagtcaagccgcagccgtggggagccnnnnnnnnnnnnnnnnnnnnnnnnnnnnnnnnnnnnnnnnnnnnnnnnnnnnnnnnnnnnnnnnnnnnnnnnnnnnnnnnnnnnnnnnnnnnnnnnnnnnnnnnnnnnnnnnnnnnnnnnnnnnnnnnnnnnnnnnnnnnnnnnnnnnnnnnnnnnnnnnnnnnnnnnnnnnnnnnnnnnnnnnnnnnnnnnnnnnnnnnnnnnnnnnnnnnnnncaagccgcagccgtggcgactcgcctttccgagaccgtgcaggctcggatgcatcaggccggtctaagagtcgaacaagacttcgggatgatcttcaaactgtgaacgagggtccaatcgagaaaggctctgagcctcctctgcccgtctcgcgtccgacatcgagtcgcccatcagcagaaatatccgaccctatgagtttcgaacgcacttcctctgttgcttcgggcagacaccgcagtagcagccgatccggcacaccaagctaccaatatgaacggcccttccagttctcgtccaacacgtcctcaatcatcggcgcctcgcctcgggccccacccgccgcgccgggctactctgccaatgcgactcctccgctgaacgaaatgccaacagacggctcgtctacatccctggcttcttcgtccagcggctcgcagaattcccaacgcgctttgggatctgcgtccctcaccaagcgccccgtgaacaaaaggctgatttccgagcctacctttctctcatccacagcaagtgtccctctcgtcggtctcccacccggatccgcgctgccttcacccgtcagcgcacccccagtgccacctatgaacccccgccgtcgccgtggaaccgccacccaaaccatcttgggtgcgttcaagatcgacaagaccgattcttcacgtgtctcgtccccggccccgagcgccgaggacgaacacagtgtcttcccagatgatgagaaacgcccgcgctctcgaaaccgtctccgcaagacttccagcgagggcggtaacctgaatgcgcgcgcgcgccaggaatccatggcggacatcccgccggctgttcctcaatatccgcctcccgctatccccgccgagggaggcatgttctaaacacaacgtcccttcccatcccatcctgtacacattcaccctcccttgacctaggctctctttattcctttgtcctctgtcttctcatttacctacatctactctacctatcactccctccaaaccccccttttccgggccttttcttctcttatctggactgtcttgtcatttctgctgttgacgactagataccactcggtgcatttgagcgtctcatgtctactttcgatcttttccttctttcctttgtgttatacacacctttgagctggattttcatcttccacgtatgtactttattttcgaattcatggatacactactcgatacactggatattatggtctcgtaagctctgttactcgtagcttcaggttgaacaaggctatattgcatactctctaacacgcctcattcaagccccggccactacacagtaaattggataatgtggacgtattcccgtagattcgattataggacgatcaagcattgatcttattgcgcgcgcttggaaagcatcttaaatggtatataattgcttttaatatagtatcatacattttcattgaaattagttcaagatctatccaccgccgtcttgaggtatcccaagaccctctcaacaagccacttccgcgcctcagcttggtcatcattactcaaagcatgagaagcattagggataacgccagtgtgcgtttgatcccaaatctgatatttgccatcatggtccgtagccttctgccacctcgccagcatcttgttcttatccacataatcaggaaccgactgatccttcccagagatcaataccatcagcttatgattcaacagtgcctgctcttgaatccgaccaaaggtagtcaaaaagtggtcatcgctgagatccgagctgaacagatcatcctcctgcggcgactgcggactctcaggactaaccagactcaagaatctgcgacagctaatcggcgtattggcaggataaatcatagaagtcaactccagaggaaggatagtatcatggggcttgccctcggcaacagccgccttggccagcgcctccatctcatcatataccgcacgtgccttctcaggcgtcgtatctccaatgccccacttcaacacgcagaagatagcctcgcggtccgaaacgggcgcttgcatgatcgcgccgtccagcacgggccgcttgatgtgttcgatctccgggtcgaaggccgggatcttggtgtgcgggtttggcttggagaggtagtgcagcacgcactggctgcccgtggaatggcccatcagggcgatcttgccgccgccgaatttgtcgcctttgtagcttttgatgtattccagacactgggcgatctcgtccgtgtcgcggtcgagatggccgaggccccaggattggtaggaggatgtgaggttgagggtgaagagggaccattcggtttgctgtagggagtgggcgagatcggccatgtaggatgttgttgcgaggccatcgccgagtccgccgacgaagaggagactgtgcggttggcggacggtgctggaggtggattcgaatgtgacgagggtttcggtctacatggtttcaattgttagttgtagtcccaattgttattgttgacagcggtgcgggaacatacgtagtggtgcaggataccgggaaggcctcctttgggccagaacttggacatgttggcgtgtgtgtgtgtaaatgtgtgtagtgggggtagtgtcagttgaagggaaaactattctaaaagctagagagggcgacctccgggacaggatcttttctttaatgagccaattgccgagatcgggctctatgtctctccggcatgacggaatgtggacaattttgtgtcggttagcttggaccgaataacgcgatccacaaggtgaacggtttcaggccatcttatcaatctgattataccgaggcaagccgagatattaggtaacaaatctcacatccatggaatgttcagtgccaaggtccaacgttggaagttaggggaaatgcgggaaactgcagactttttgaggaaattatatcgatgtcttgaatcaggtacatgtatttcaaggtacccgttcaggtaatactctgtattggaaaacaacgggctgttacgtattggatacggcgggatgtatttcgtcatcacggtaaatacagcaattcaagctcgattacgcctgttacggctagtaattatacaaagctttgcacgggaagtgagatggccaatgaaactccaccgttgaaacgacacatgcagactagtcggcactagcctgtataggcaggatcgacggatctgattagattgattggctgaaaacaggagaatctgattagattgcccctctttgaaaactctacccaacgtgcaggttcggccgaacgttcgtcagcatctgatcagcatgtgcatctcaacacaagacttttctgaaatgcttaggaagtcttggtcagccttgccaggctcattcgaagatctttgcctgaagaggttgtcgtcgtgtataatattattcattcggattcgaatgtagacattgtgcaaaaataagattaaagtatatgcgtagcttttatcagaccacgaaattaatatagacaagtggatggctactttgtggcgtttgcaagaaatccatttaaacttgtctacaagcgagccaagaaatcaacgtaaggaacgtgcgcgacagagtgaggcctttatcaaattttctttttaatattccacgcttattgcgcgaggtccaagcggatattgacttattattatgtactattgttcaatgtattcggatgattctatgctagtacattgcgagaagtgtacacgactggtacacgacacacatgtgcgtgtgatttttcaaggtgggtctcggaatgcaagaatatcgaaaatccccttcctcgttcttcgcttccatcgggcttttccgcttgacacgcacaatcgtggatcccctaagcaattggcctccgagacctcggagaaccattctttttcagtttggagtgccttgatgtgtttcagaataggacgatcatattcaggctgactgcaacatctgttattttaatttatgtcttgatggtgagcaatatcctaactggggtcttccgtaaccaatcttggcgtagcatttccttttttccctcgtttttcccttctttcctcttgtgtggagtctgtggacccgatacgtcctgtatcatacagtattgtatgcagctttgagatctgaaatcacatacgacatacacgtatgggtccaaaatgctcaggaaagatgaaacggccacatgcttcggctttcatactgccttccagaacgggcgtgaataatccactcaccccgcaatagccgatctcggtgatgatatgcaaaatacatgcagggcacattcaggatatcttcggagctttcaagccttgaggtggagctgatgcagaaccgtgtctagttggctatatagtgacacacttccgtcaaattaatccgcgcaaaggctcccgatctaacaatcaagctcccaatcccttcacataaactcgagggtaccaagaccagctgcgctggtcagccgtcaaaatgggcttcatacctctcgaagatgccaatattcgcaatgcgccaaatggaattgagaaagtgccaacagacgtcaatggcgactttagctcattccacattgcggatcttgcctctgaacaaatcatcactccgaccggcatgaaggaagagatcgtgctgttgtcctggctcattgtgttgttgcgcagccgggaagacagccaaatatcatacgactggtcctacaaatattccgcaaatggcgctgagcccgagtcagtgaacaaaatattgatgaatgaagtaatgaaaggattacaaagtaatgtgggagaagttgcgactgcgatctctcggaatatcaccgcgggagcgtccagtgacgcatcgctcgttttgagtaccagctctctttcgcgaacatcggaagaagccaaagatgaagtaagtgaacgattaaaaccatagccactgaattataactaaccgtaattgaaaagggtatgcttcatctcgaagttcggttcgataatgcccacctcgagatccgcccattgtggcacaccgagaacatgttgccgtacacagtgaagcaccatgtcgaggcacttgccgacactgtcagagtatgcctcggaaatcccgatgcgacaattgaacaatgtcttcgcccgactgaaagtgatctgaacgatatatgggggtggaaccacgaattgcctcccacctacagattttgtatgcaagatatggtcgctgaaagagctcgcgaatacccagacaaagtcgccattgattcctgggatggcagcttgacctatagccaaattgatcagtggtccacttccgtagcgtgctcgctcaaagaaatgggcgttgagctgcacgatgtcctccccgtgtgctttgagaaatccaggtggacgatcgtcgctgtgcttggagtgatgaaagcaggcgcaactcttgcgctcatggatccaacacttccgcttgcccgtcttcaaaacatggctgtacaggtcggcgcaaagtccatggtttcatcccgcatgcagtatgagctgtcgctggagatcatgcccactggaaaccacttcgtcgttgaagaagacgctttcacaaatccagcaaagtccccatcaatttccgacttacccgatgtaccatcctccgccctcatgtacatcatcttcacctctggcagcacgggcactccgaagggagtgaagatttcccaccaaacttacacgagcagtgcaatccctcgagcaaaggcagttggatacacgccagagtccagggtgcttgatttcgcatcctatgctttcgatgtcagcatcgacagtatgcttttaacactcggaaacggtggttgtctttgcattccatccgacgaggatcgactgaatgatatcaacgaagttatccgcaaaatgcgaattaactacgcaggcctgaccccctcagtgggccgaattttggacgcggatgtcatcgcatcgctcagcggcctcggtctcggaggtgaagctgtctcggcaagagacgccaaccactggggcaaagaaaccagaatcattattggttacggtccctgcgaatgcaccattggatgcacagtcaatgccagcgctgctaccggccgagattatctctccattggcccaggcaacggcgcagccatgtggattgccaacccgaatgaccacaacgagcttgtgccagtcggcgctgtgggcgagctgctcgttgagggaccgattgtcgggcagggctatctcaatgaccccgagaagactgctgcttctttcattaatgatccaccttggttggttgcaggccacaaaaactaccctggtcgtcggggccgtctgtacaagactggagatcttggaagatatgatcccgatggtcttggtggtatcgttttcgttggacgaaaggacactcaagtcaaactgcgcggacaacgtgtcgaattgggagaaatcgagagtcagctaaaggctgttctgccttcagaagctaatgtcattgctgaagtgattacccccaaggattatggaggtcagccaatgctcgtcgcgttcgttgccttccaaccaaagggacatggacaggccgagcttgccttggatgacatctcaagcgaattaagtagcgtattgacaaaggccaatgcggacgtggcgaagactttgccacgttacatggtgccaaccacatatatcccggttaatcttatgccggtgttgatttcaggcaaaactgatcgcaagcaactccgagcatttggtgcgacagttgatctgcgccagctagaccaaggagctgcaagcaccgcttcccgggaactgaatgagcttgagaagcgcctgcgacaggcctgggccgaaacactcaaactcgatgcagaagccattcgccccgatgataacttcttcgccctgggtggtgactccttggcagcgatgagactcgtgtctgtctgcagagcgcaagatctcgacctttctgtcatcagcactttcggaaaccctaccctctcggcgatggccactgtcgttcagccttgcagctctcatgtacaggaagatatcccggcattctctttaatctcccaatctgttgagagtgctcgcctcgaagcagcacaagcttgtggggtggatcaagaagacgtggaagatatctacctttgcacacccacacaggagtcactgttcaccttctcgctcaaatcgacaaaggcgtacgttgctcaaagagtcgcatgtattccgtcggatatcaccctggatgcttggaagaaggcctgggaagatgttgttgcagcaagccctatcctgcgatctcgtctggcaccgcttcaagacccaggtctccagcaaattgttgtgaaggaaggcatctcctggagatactccacagatctgaaccaatatctcgagaacgaccgaagcgagaagatgaaccttggacaaagtctggctcgatacggccttgtcagcaacgagaatgatgacaagcggtatatgatctggactgtccaccacgttctctacgacggatggtcagagccaatcgttctcaagcaggtcagcgatgccttgcagaaccgttctgtcgcgatcccgacacagatgcgggattttgtcaagtacgtacgcgatacagacgagactgccatgcatgacttctggcgacgggagttgaagggtgctgtcgggcctcagttcccccgcctgccctctcgtgactacatgcccactcccaattccatgatcgaacatcagatttccctcgagacagttgctggatcgcctttcacgatggccacattggtccgcggtgcatgggccctcgtcgcctcccaatacactggaagcgacgatgtcgtgtttggtgagacactcactggccgtgatatttcgctaccgggtgtggagagcatcgtcggaccactgatcgcaacaattcccattcgcatccaggtccgccgatccaactcagtcgaatcctacttgcagacagtacaacaaactatcgtggctcgcacaccctatcagcatatgggaatgcagaacatcagaaaggtcagccaagacgcgcagtatgcatgcgaagctggcaccggactggtcatccagcccgatcccgagtacgtgggtagcgagcttggatttgagcttggcgatgttgtccgcgaggcgcttcacttcaacccgtacccactcatggtggcctttggaatcaacaagggtggcctcagagtttccgccagtttcgatagcagcctgattgagagttcgcagatgcaacggattctcgcacagttggaaaccgcttgcgtgcagttgtctaagggtattgacaagcgcattgatgaaatctcttgccttcccgagactgaattgaatcaaatttggcaatggaaccagactcctcctcttttcgttgacgaaacctctggcaaccttcgcgcccatgcgagcaccaaacagggatcagtctatcctcgtactgtggttccttgggtttgtgatgctcgcaacccggatctgttgtcgcctattggcagtgttggagagctctggcttgagggagcctgcctttctggggaaacagtcgaatcacctgcctggcttgtggctggaagctctgaacacgctggccgatcaggaaaggtgcagcctacgggtgacatggtccagctcagagatgatggaagtctggtatttgttggccgcaaggagaatgttgtaccccttcaaggacacgcggtggatattgcagacctcgagtcgcatttcgcagctcacctcccatccggaactcgggcagctgcatcggtgttccagccgttgagagaaggcactcaaaaagcgtccgagcaagagctggctgtcttcatcgagaatcagccttctcaggaagacagtgtaagagtgatgccggcgaaatacgagatagtgggcgatgagacgactgtatgcgacactattcccgttacacttgctgtgtcattgaagaagctcgacaaatttatccgtgactcattgccatcctacatggccccatctgcgtacgtcgtggttgacaagttacccgctggactggagcaactcgaccacacctcactcaaccaattggcatcgaagattcctcgaaacgtcttcgaagatctccgtggaggcttcaaagaggcatggacaaagggcttagcgcagacaaccctatcgcccacagagaagatcctgcaatccgcttgggccaagatcctccgattgagtcccgagcagattgacgtcgatgacaacttcttccgccttggaggcgactctgtcttggcaatgaaattggtgtcaagtctccgcacacagggacacagcttatcagtggccgatatcttccaacacatgcgtcttggtgatgcagccaaggtgctgaaggtggaccaagcgaaggaagccgctccgctatacaagcctttctccgcgctgaacaatctggatgtcaagatgttcttggcctcaactgtccggcccaagcttgccaacccaggctggcccatcaaggatgtgttctcgatcacagattcgcaagcactcgatattagaggaactattggagcaccacgcacttccatccaatacaccatgctgtacttcgaccaaaatatcgatcgcgagaagttgattagcgcctgcaatgacctggtcaagacccacgatattctgcgcactgtcttcattgagcatgaatcgtccttccttcaagttgtccttgaagacggacatgtccccgtgatcatgcgccaggctgacaaggatattgagcaatacgtcaccgacctctgcacaacagacatcgagtcaaacttcgaacttggatcgccattcctcaagatcttccatgtccaaggcaccgacggaaagcactgtctcgtgctaggcctttcgcacgcccaatatgatggcgtctcactccccagactgcttcaagacctggagaccctatatgccggagacaaggttgtggactttgagccattcgcctcatacatggcacgagttaccgatggacgcctccaaactaaggcaatcagctactggggcaagctgctcaaggattcgacactgtctgtcctcgatggagcctcggcccagtccacagacaaatccatcttccacgagaaggccgtcgaagaattccagcccgtgccggagatcacgacggcgaacgtgctcactgcagcatgggcactggtactggcccgtcgtctgggcaaacccgatgtgacattcggcacggtcacctcaggccgaacgatcgacctagcaaacgtggagaatgtcatgggtccatgctaccaactcactcctgtcagagtgaagttcgagtcgcagtggacagcgatagatctattgcgctttgtgcagcagcagagtgccgagtctgcggcgcacgatttcctcgggttcgagaagatctcgaagctgtgcgcacactggtcatcggaggtacactcctttgactcgattgttcatcaccaggactgggatgatttcgatgatatgccatttgctggatcttcttgcaaggttgatatttccaacccacatggcgatgctgcttatcccttgaaggctgtctcgttcgtgcgcggtgggaagatgcatgttggatttgttggaagtgaaaaggatgtgacttttgtggatgccacgcttgatgagttagctgctgctgttcaggagttgtcgggctgtcgctctgatcccctggttcttggtgcctgaatatgatagatgatatatgatatttttgtaaagcagatagattgagatgatttgaaatttgattgaatgtttttcttatatttcacgtgtcttttctacaaacctaaaggacctagatactcaaacctttggtttatggcttcatatcgtgccttgtatctctttttttccattgcagtgggaatcctcaaattgtggccctattttccaggtagggagaaaatctcgaataatcccagagagaagagagcccagtcaccactcacagaatgaaaaggagcttacaggatgttgctacattaggagataagaatgtctactacggtctgagtgatctccatgcttgctagctgacctcgctggatggtgttgttgtgtcgcactcgtggccagactgcccatcgtgcatatccttcttcaatatatatcttttgaatacgaaaagatgccggccatttctactagtaatagatcataaaaacactggtaaaataataataataataataatagggatatatattaaacaagtactagaaatttaaatcggacatatacttttcaagtcgccactgtctggtgcatgacattcgcccggtaactgtcggaccgcaggagcaattcttcatgagagccagagtcagtgcatacaccaccatcgatcaagaaaatggtatcagccttccggatagtgtgaagacggtgagcaatggcgatgacagtgattccccgtgcggccttttccagaccatcctgcaagagcttctcggattcagcgtccaaagcactagtcgattcatcaagaatgagaagcttgggcttgcgaacgagagcacgagcgatggacaatctctgcttctggcctcccgagaactggttaccactcggtccacagagcgtctggtagccatttggcaatgcagcgataacatcgtggatgtttgcgagcttacaggcctcttgaatttcttcaagggtcactttgtggttgggtcgggcaccgagaccaacattgaactcaatgcttccttcgaagaggacgctctcttgaggcacaagagaaatccagtcacggaaggtgacatccgaggtcttggtcacgtcaactccgtcgattatgatagagccagattcgggtttgtacaggcgctcaaccagggagatgatggtcgatttaccggcaccactgggtccaacgagggcacagaacttgccggggcgaatatcaatgttcaagcccttcagaatcttcatgtccggccgggcagggtaagagaagtgaacatcgcgcatctgcacactcgaagccgtgctgcccgagttgtaggtgggtttctcttcagttgcctcgacatccatggtgtatggattgagccggccacccatcttgtccttgccgatctcaatcaggccaaggattctggacattgccgatcgcgcggcagaaagctcaggtgcgagtgcgaacatctgactccaaagcagggcactgactaggagagagaagacgacaatcaggaactgggtctgactgtagttgccgttgatgatctgcttggaaccccaccagtatgccagtgcatttaccatgttacctaggaagtaggtcatggcttgccagaaacttgcctgcacggtgaccataaatgtctccttgcggggtcctttcagggatcgtcggtaggtccttaaagtattctcttcaagagaaagagaggcgattgtcttgatagaggtaactgcttccacaccgatgtcgacagacttggtgtaagcgttttcatgacgctcctcgaatttgccgaggaccatgagctccattagaccagctccaagcagaaggggtacaagggccaggcagaccaaggcaattctccaggcaataatgtgggtcagaataatggcggcaatgaggttgacggtgatagagaacagggtgccaacgacagatccgctaataccggcaagggcattaccatctctggtaatataggacagaagtagagcaggcgaccggccgttagactgatgccactggagatcttgttcaaacagtgaccggaatgacaacactcgcaccttatagacgatcttctcagagacaaggccgaatcctccccagctgacgatatttgcaaagaactcgatgatcgcaagaacgaagaacatcagaccgtagaagttaccccgtgagctgatgctgtctgcagtgtgacaagggttgagacttccgaccgtgtttccgaaaatgacggcttcgccagagaaggctccgccaaccatgctggaaccgaaaagagcagcaaaaatgacaagcgtatggggcttgagagctggagcataacccttgcaaagaccccagacggatctgacggggccctgaaggtctctattttgttcctcttcctcatcggagtcaccggctggtgcttcagtggttgagacacgggtttcctttgtaggttcatggtcatgtgaaagaccgcccttttcattttccatgtcggtaatagaggtagcatcggacttgctgacgctctcaatgctggcagtggtatcagtcttggatccagccgcagctccgagagtctgcaatttaaccagctcagagtaaggcccattcgcagccatcaactcggcgtgagttccctcttccaagatatctcccttgtgcatacagacaatcttatccgcatttgtgatcgttgacagacgatgagcaatcgtgataacagttcgaccggttgagatgttgttgatagcccgttggatacgctgttcactgcgtgaatccagagcagctgtggcttcgtccaaaatgagaaccgcaggatccttgacaagggcacgcgcaagagagactcgttgcttctgaccaccactgatgagtcgaccactagagccaaccatcgtggcgtacccatactgcaatgcttcgataaagccatctgcatcggcaagcgcggcagcatgtcggaccaattgaacgatttcgacgatttctgggccccgtctctctgctgcggtcataagatcttcaccctctctgacttcggtggctagatcaccgaggtccgttgaaaggagtgccatcttcaggtgtgcatgggctggtttgcttgagttcatcaagccgtgtgcgatgttctccaaaagggatcggtcgagaagggaaggctcctgctgcacaagactgaggaatcctctcaagtcacgggtattgacatcgcggatattgtggccatcgaaagtgatctcacctcccgtggcatcatacaagcggataaccaaacctgcgatggtggactttccacttccagaaaggccaacaatggcagtgtgcttcttgggagcaatagagagattgatcttgttaaggacagtgatctcgggcctggaggggtaaatgaaagagacgtccttcaattcaaatccaccctccgcctcggtgaggcgaatgccctcatcggagtgtccatcaatcaaggatacacgatcaatatcgcttcgcagcttgtggtaacaggcaacagcctgtgtaaacaggtggataaaaggtgcaacttgactcagaagcagggtagctatcgttaatgttagtaaaatatttcacaccaagatatctattaaactgaccttcgaccaagacaaagataaccgtgaaaatagctccgacagtggctcccgcagactcgcggcgcactgctgcggcgatctgtttacttccttgccagaatgcaagaccgtttgcaccatatgagacgaaatacaagacaccggcttgaataccagtggcagacgcctttttcaatccttcggtttccgagtcctttaacgccttggagaacttctcctctagacgagcgttggcaccaaatgcatgcaccacaacaatgttgttcagcgcttcggaggcaatcgacgcagcggaagcagcataatccgacatgcgcccggtgtatttctcgatataataacttccaacaaatgacataatgaagtatgcggggatcaaggacagtagcatcgcggcaagaatagagtctttgataaatgccacgacgtatgcggtgacgaaaaaggagaaactcgagatacagattccgaccttctcagctgtaccggagcgaatggtttggatatcggtattgagtcgagaagcaacttctccggccggcaggttatcaaagaaagagggttcttgtcggagcaggttctggagatacttttcgcggagtcgctgcgccaggcgcgcaccggtcatcgtccagcatagtaggtgaaggtagattaaaacgaattgagcaatgcccaggtacacgatcagcagaattctgctattgatgtccgcttgatcgctggagtccccttgctcgccagcagcttcggcacaggtcaccgaattgaaatcatcgataagttgaccgaatacgataccaatgatggggaaagggacacccgatccaattgcagacgccaggccaacaaagagggttaccaattcgagtcgtgagggattggcagccacaagcagccgagggtagtctgcaaggttcccgaaacccatggtgactcgagaatggcgttcaacactgggattgtcgtttgagtgttgaagaagctaagttcttacaggcgatcaatttatcgctttgcagttttaaaagtggcgtcaccatgaaaattgcacccacttcttagcgtgagtccattcggcgaaactactttagctgggttgcgacaaagacccaaggaaagatgtatgccaagtgtaaagatggggattccaggggatttccggatgtttaacctgccgatttgattttttccactctgccgacatcggttttgacagttggatccgaagatgcaacccacaaggggggcacctgaagaatttcaattatacggacgggggttatcagatcaaaatgggggtttgagtaccgtggttacccttactgccgtccgtacgtgtaagtctgggtcaatacggctatactgtatctataaatcccaagtgtccgtattttacatccggaaaaaatacactatgtatttaataaaacaaagtggagagacggtaattaatacggtacctcaaactctgtcttagagctagcaggacgtcctattggctgatatcttgttaaatatccgaaaagcatattccatcagaatacgtgtagtataacacaatatcattattattcgaacgtacagaaagacaacaaagcccagtgggtcctgtcacatcatcctatctttttaaaaaagcccagaagattatctgattgattggggcaaagcggagtgcataacgcgtttctagggggaactgcctgaacaaggaagctcgaggtggagaacacgagctacccccacttgtctcggaaagatgatggaaatgaattaaaaataaaagaatatctcctgaaattttatacattgcacaatgttaagcttcgccgatcagagtcaagtatgagtcaagaaagctcaagcaaatttacaatttcgcattccacgcggcgcgatcagcggattctaaaggtcgctcacgtccgtcccagaatagtggacacaactggaaccatttttcgcgactgcaaatcgaatggaccgatcgcttatggccgagatcgacgtacttgccaattgtgagtccttgcgcgttctcgtaggacaagatggtcgccccggtggccttgggctcaccgacagcattagcggtcctgggatcgtccaagaaaacatagtggatacagctcgagtaccaggcatttacgcggtgtgcacctcggaagctggcatcgccgacaagagagtgacggcctcggtcatagtctccagcatcgtagtaggcgccatagtgatcctcctgtagacaaggtgttagtgtcaatgccagcctaaagcttgacggagtcgggggatttacctttgaccagtacaactcataatacgaaaagcgggtatcatcgaagcgtccgaacaagcacagaacatggggatcgaagtgcagtttgcgcagatactcggtgtgctgttcaatagttccagtctcattccagcctgcggcaacacgcgggtcattttgccacttgttgaacagctggacgtgttccgcattttgccagtcaacgacttcgagcgagaagtgctcgttgatctcagggatgtagcgactgtaggcaattgatccggggaacggcttagggcggcgagtcgggtggcgggtatatacaggctcctcggggaacttgtttgtcatttggtagttctccggcatgatgggatactgagacaagggctcccgcatggggccgtctgtgccatctcccaccacccagataggacgagggcccaatggagaagcagcaccctgccagaaggcgcttcggagaatcagcaaatcatcgaattgcagagccttgttttctctgtcccgcaggttccgcgggtggtcgattgccaacccggtggtaagaagctcattgcggatgacttcttgccctgtgccggacagggtcagtctgaagtactcgattgttgggtgaccaagataaatggcgtgaacaacgttccaaatttggcccaaagaaggggtgctgttccctgaccactggaaaacagtctggggactgcgacgcgcgcgaccccagggactgttatctgagataggtggttgctcggctttgggaatgaatgtcaagtcaagccatgagagcgagtctgagtgtagctgttcaggcaaaggccggccctttgcgggctgctcgtcaagtgtcaaggtgcgcgtagccggtgtcgatccattgactgtgttcacacgatatgcggtcaggtaagggtgtggtagcttgaccaaaggatactggtgtgatttggaggccattgtcgtagtttctcgatcgtcaaaggtagggatcaagaattccgaaggagttggagtgtcggtgtaagaaaaaaaaaaaaagagagctccccgcgctgcgcaatcagattatatgtatggagtaggtgagaccctcaaacggctgaagaatatcaattaaggagatagtaaccgaggccgaattctctcacatatgtaacgaatggtttcgggatacacgagcctgaatttatcaccctatggggctgttattttcaaacatgtacaataatatatctgtacgttgtacggagataataccgatgtcgtcttgttatggagccaactcccgaggttccgtggaagctttctgcgcccgagctctacgaatgacaatacataatccgtagcccagcccaagagaaaatataaagtcgaagtctaaggttgaattagtcacaatactgtgcatattctgcttcacaattcatcatgtcgttacgatcagggcccttgaatcatgagaatttctatatctctttcccgcatgagcggattgtccaggtcacaatcaatagaccggacaagctaaattgcatcgacaagaagactagtcgagagattgccaagatctgggagcagttcgatgaagatgaaagcttatgggtcgccatcatcaccggtgttgggagagccttctgcacaggcgcagatctaggaggtgggtttcttctttctatcacctgaactatcgactgacggaatcgagcagagtggaacgcaatgaacaaggcaggcgtcgtcaatgacatgtccgctcctggcctggccggattgcctcgccggaccggcaagaaaccgatcatcgccgcagtgaacggcctctgcatgggcggagggttcgagatggtggcgaattgcgatcttatcttagcctcatcatcggccattttctcccttcccgaagtgaagcgaggcatcgtgccagtagccggatgtttaccgcgattgacccgcactattggcctacaacgcaccatggatctcgtgcttactggcaggaacgtgagcgccaccacgctacatgactggggtcttatcagtcaagtggtggagccaccagccgacgttgtccgagcagcaattgaagttgctgaggtcatgtgcaagaatagccctgattccctcattgttggccgtctaggtgttcgaatgagctgggaagctggcagcgtggaggatactgtaacagatctcgcggatcactggtatcctcggttggttgggggtcctaactttgccgaaggcatccaggcttttgtggagaaacgatcaccaagctggaagaattcaaaactgtgagaggaaaaaagtccacccacactacaccgtaatcagatttggtggcgcaaccattttccacagtccgatggcggtgccatggttgatagtggagtgtgtacttatctgatttaactgtaacgcgacgtatttaattaatttcttttttttggaatgtttgggtcaaaataaactgcacgtggtaagcaccttaaaccagaggaagagggatgtatgcattgaagaagatatgtaggaaataactaaagatattttcatagatctgctattaattccaagagtcttggaaatcgtggaaatctcatgcgtgtttcatcgaactccgtttaataccatctcactgtattaaataccgctagtacctagttagtacggagtacatatattgttctccgtactatgtacccactgataccttctacattgtatgatgagtacatatgaccgggtgaatccgcacggatctcgcgtctttagtaagtagcttttagtgctgacccatgacgccccaaacacattgacccattattgtcattccttattaatataggatttttttcttatatctttttccggctgtcggcgtgacaattccattctgcatgccaagcaatgccaaggtatggattaccgcaacaggaagcttccgcgaggtacttgagcttcaagcagttacatccccggttaacattgccctcgcttcgtctctccggtatgagattcatcattcatgcaatcttattagcttctacctttggaaagtcccatcatggctgacgccgtcagtggggtgactagacatggcctgcatacgaccatacgcaaagaagccctagggaggagaggagggaaaaaatacagtttgttcgattattactccgtagcgaatgaacgctaagacatcgccaagacatttcctactggttcatttcacacggcgtgcattagccttccaagattgtaccaatccgccgagttcggtatttttttttaagcgctggatctggagcaccaataaccagggattatatttgctataagggcaaggattcccatgcgcttttgggttcctccaacctactttttatatttcctgatctccagatcaacatgggtgtttccaggttccgatctgccttccggcgatcatcgacccaggactctgttactcaaatccctgtgaccactgatggcgatgaaaagagcaaaatccctaccgaccccgttgctgtacccaacagcgcggaccccgaagttcccactcaagatgcacagcaaggtgtcagggatgtcgaggctgtgactttgagttggacgaggaccatgctgattgcagtctttgcaaagtaagcttttgttccctcgcctcgacgggcgatcgacccgtaaaaaccagcttatttactaacgtgaatcttcaatagcatctggttcttgtacttcgtcaatgctatgcaatcctcgattaactacagtttgctcagctatgtcaccagtgactttgagagtcattccctcctgaatgtcatctacattgttgcagacgccatgacagcctcagtgtacatccccactgccaagatcatggacgtttggggccgtgcagagggtttcctggtcatgaccgtttttgctacgcttggtctaattctcatggctgtatgccacaaccttcccacattctgcgcggcctacgtcttctacagcattggattcggaggtatgacatactgtgtcgatgtcatcaccgccgacatttccaagctcaagaatcgaggtttggcttacgctttcacctcctcgccatacatcatcacagccttcgctggtcccaaggccgccgagggcttctacgaagacattagctggcgatgggcctttggtgcattctccatcatcttccctattgttgcctcccctctttacttcatcttgaagagcaacctcaagaaggcccagaagaacggtcttctagtcccggagcctagcggccggaattggtggcaaagcatttggcactataccaaagagttcgattgtgagtgaagagcttttcaaagcattggaaaattgggaatactgacttgaatagtgcttggtgttttggtgttctctaccggccttacaatcttcctccttccgttcagcattgcaacgtacgcccctaagggctgggcatcaggctacatcattgctatgatcgtcatcggatttgttatgcttggcctcttccttgtttgggagttccgctttgctccgacaccaatgttcaacttcagactgttgaccgatcgaaccatcattggtgcatgcttgctcgacgcgacataccagctctcttactactgctggaacaactactatacatcctttttgcaggtagtcaacgatctcaccatctccgaggccggttatgttagcaacactttcgacgttgtctccggcttcctcttgcttggagtcggtttcattattcgcaagactggtcgctttaagtggactctctacattggtgtcccgctttacatcttcgcccagggattgatgatctatttccgccagcccgaccaatctgtcggttatcttgtgatgtgtcagattttcatctccattggtggatctgtcttcatcattgtcgagcagcttgccatcttagctgccgccgatcaccagcacgtcgcaactgtcctcgcccttctgaacgtcgtcggtaccgtgggtgatgctgccggttctaccatttgtgccgcaatctggaccaacaccttctacaaagcccttgaggcgaggcttcctgcctctgcgataggagacatcgatttgatctacgaggatattacccagcagctgtcctatcccgtcggaacccccgcgagaagggctattcaatcagcctatgcctattctcagacacgaatgcttgctgttggcaccggtctcatgggtctttgcatcatctgggccatcatgatccgcgacattgacctcaagaaggttgctcaggtcaagggtgtcgtcttctaaggtgtttcccttcttctttggagataattttcgacaatgataatgttgatgatccatttcccattatatccaaaccacgactagctgctcccaggcagttatcaaccttcgctttttgtaccttactatttaatcatatcaacatgacggtctgaatgcagagtgttatgactatccgaaacaacgtttctattcttgtaaatacttggcaatgatattgccccgagttttccgcgacctgtagctcgcttggtgtttgtttccgtttaccgggagagccgcggtatggtatgatatggtttggtatgtaataaaataaaattggcactttaaataagttatgcaaatataccgctagtaagtatgtaagtaatctatgtatcaaagtatgaaacaaaaactgtctgcatgtgctttcaagtgaatcttgtgaaattcgagcaatacacaaccataattatgttgagtagcagcttgcagagcccggtgtcatctgacagatccacgtatgactaaagtcatccattcccgaggtccatggtggaaccagggaatatgtaaaaagatctgataagtttcttttccaacgcccttgccgtttttgtacggcactacccctttcctttcggctcaaaccaccctgctgagacgtggctgaggacctcgaaagttacctatcatttcaattagcgaagtaataatagcagctgggattagattgatatcttgggaacatttctcttacaacatgcggagtacaagccgaagttctaccacgttgctaagtgggtatggccgcgttctgaggcgcagccggatgttcggttacaatcttcctggaaatattccgaatggtatggaatctgatgattttatctgatcatctgattagattgggctactggttcgggttctcttggcacttttatctgatcccaaggcgttcggtaggcacgaccgccaagaagcagcccatggtcttctgtggatgtccgggttcggcggacttcatctcgcactatttccctcccattacgtacttcaaaagtagcaacctagtggcgtggccttgactgcttgacagaaaaccttgccaaatgactcacggcttgaatcccaaaggtgtgacatgaggtgcaagtgtgaccaagacttgagggcttcgaggtcacgtgtgacagccacatggtacatcatctagagagagaaagactgcatacccaacgcaggttggcaaacaagtccattaaacctccacttcttcccatatcttgtgtcctttctcccgttttgggattttccagaatggccctgttggaaggtcagatcacatgaccttcattgttcgctcctgctacatagtcttctacaagccttagatagttctttctccacgcagctgagtttttcagtaatgatcaagatgcgctcctccacgccatgaacctttccccagctgagacagttatcatataattattacatgacaccttatgcaagaagcctctatagtatattgcatggatgcagcattaactacctaaatttattcccttcttactcggaaaaccccaccgatggccacatcaattcatttgtggaatatgaaagtttgatccgcgagatgtaggatttgtaaagttagatgggcctacttaagtctgacatttctctgcctagccttcacgatctacctatactgattggaatcaacttgtttcgagcaaagtcgaccgtgcctagcctcagcgatgccaacctgtcaggattttagagcctaaagacaacatcgggtagtatacaaagacctatctgtattcgagattgaagcagctcgatgctaaagaacaagatccaggagggaaaaataagcactatccgctcctcttgtccttctcccttctcaacccgaaatcaccacgtacgactcatttataacgccgtgaaggaaacctgcctcggcatcagatcacaaatttgttcatcgcaatcaacaagtaggatcctttcaacaagcatcctatcaaagcaagttctcctctactaccaacaaggggatcgctttcagccggctgactgatcgcccattttccagaaattacaacaatgacctagctcagagttactgagtttgtgactcccgcgttaggattcgcacattccgtctcgaaatccgcaatggacatcaccctacagtctggggaatagagacatacgaatcaatcaacgaatctccgactacaaagccagatggccggggacattttctatgttgaaattagtataagggcaaaccatgacagttgatggaatccgagatctttcagtcctcccaactgtttgacgagacgctcgtcccgctgccaacctgttggatacccggaaggcagtcacccatatgggtccagatcaggagatagctccgctctcctcctcttctctctcttctgctcccgtgcactttattttggtcgaatcgatactggttgttctcctcatcgcagatacaatgtagatcgatcgccattacaaccctatatactatgaggcgtggtcaaacgtctgggccctaggtgacggcgatggaaaggactgcgagacccaatataaacagcgcagcggcgacccccgctagagaatgaatgagcagtcttcatttcctagtgtcggggacccttgtagtggtggttgtcttggccttggcttgggtctgcgtggtgagacggtaggaaagtgcagttggggtatcggggatgaatttgatctcacagatcctgctgcccctgatctgtaagtggggtgggtagtaaaaaggacaaaggtgaaagtcagtttagtcaaatttcgagtttgaagtggaatcaatcgcaaatcggaagtgaaattcaaccgtaaatagtagaccatgtgtgttaaaaaggtatagagtagggttgggaaagatagggcagctcagtgacaaaaacatggccgttcatgttcaagtatccagtgtcattcataatattcttccattttggtatctatgtcataaaacaaaaaggaacgtgtcctttctatacatgtagcatctctatcgaccatttctcgtacgaaaaaagcttactgcttatcggggaagccgaagtcgacaccgaagggagggtagacaaagcgctggagcttgccctcagcctggagaccatcactgtacttgcgaagggtagccaggtcctcagcgtccaagaagatcaagtcggcacgattagcctcaatgcgggcaggggtgacggacttggccaggactgaggagccacgggcgactagggagaaatcagttagtacgctatattcggtccagtgggtaaaggctagagatacttactgtgccagctgagcaaaacagtagccggagtaactccgcgcttgtgggcgacggccatgatgggctcagcgctgaatagcgggctgccggtactgccaagtgggctgtaagcggtgatgtggatgccagtcttgttgcagaagtcgacaatctcctgctgtgggagcaaggggtggttctcgatctggttgacagcgggaacaatagtggcctgggccaggagttcctcaaggaacttgagactatagtttgagacaccgatggccctggccttgccagtgccgatgagcttctccatatccttgtatgtagtcacatgggagtggctgtggataatgtcccgtgagccatcagcgagcttggggaagatgttgtggtttcctgtgatggaagtcagcgccgcgaatctgcatatttgaagaaattcaactcacccttggggttcattgccagaggccagtgcatcagatagaggtcgacatagtcaagtccgaggtctttcagactctgctcaagaccctcctcaacacgagcgtggaaagagcaccacagcttagtggtcacgaagagatcctcgcgcttgacaaagccggcgtcaatggcctctttgatgccctggccgacttcgttttcgttgccgtagcaaagcgcggcatcaatgtgacggtagccgaccttgatggcgtggaatacggcgcgcgcaacctcgccgggctgggattgccatgttcccaggccgagtgccgggatctcggctccagtattgagcttgaaacgggtatcgcaggcagccattgtggatttatcggggtatcaagagagaaggaagattatttacacagaataagggaatatgaacaaattgaagtagaaatggtcaagaaaagctctggggaaaggcgggggtttacaaaggataacaaccccacacggctatcggggttattccgttcctccaaggtcggccttttttccatcaatcacctcgaccatcttttgggatcttcgatgtgcttggaattttctactgggagagttctatattttttcgatcgacctcgaggagaatgattttccccacacaataaccgtcagaccaggatccaggagaacaagttagcagatctacggaaaccgtcttccagttcgacagattcctctccgcttgacatcacagccactccacatggttggcctgtggtcgtggggtaattgtggctgccaatcatcgtcgcccttttggagagcaacccagatctccatcggcgcggaagccagaatccgtgatgtttgatttttcgtcctacgtgcgagtacatcgatgtcatggcaaatcaggcaaatgaggcaaatggatatggggagagccctcacaccactgctgatatcggaaatctacacgcgatattttgcacatcggattttcctggccttaaccctatatatacactggatctcctagtgtctatccttcttttaaccccagactttcctgattgttaattgcaattcatttggcaatctgaaacttcttatatattctaccaagaaacactacttcatccaacacagtcgaaatggcacctgtcgccatctccccacaggcctcccctgtcttcaagaagcgggatggccacgcactggaagagctctcggacgctatcgacgagatcaacgttctcaaggacatgaagaagcgtgaggctgaaaagaaagtggctgaagagaagggtctatatgacgagtccgagttcgacaaggagaaggacaagaccaacttccgccagtacgaggatgccagcgaccgagtcaagaacttctacaaagagcagcacaccaagcagaccgtcgcctacaacctgaaagcccgccacgacttccacagcaagactcgtgccgagatgaccgtctgggaagccatggagaagcttaacaccctgatcgatgagtccgaccccgacaccagcctttcccagatcgaccacctcctgcagtctgctgaggccattcgccgcgacggcaagccccgctggatgcagctgaccggtctgattcacgacctgggcaagctcctcttcttcttcgatgccgaaggccaatgggacgttgtcggcgataccttccccgtcggctgtggcttcgacgataaaatcgtctacggccgcgactcgttccgcgataacgaggacttcggccacaagatctacgataccaagtttggtatctacacacccggctgcggcctcgacaatgtcatgctgtcctggggccacgatgagtacctctaccatctcgctaaggagcagtcgacccttcccgatgaggcactcgctatgatccgctatcactctttctatccctggcacagcgcaggtgcgtaccacgagttgatgaatgagcacgaccgtgatatgctccgtgctgtcaaggctttcaacccttatgacttgtacagcaagagtgatggaattcccagtgttgaggagttgaaggtatgttttttcgcttctactgatgatctgtgaattcgaggctaacttgtttctttctagccgtactacctggaactcatcgatgagtacttccccaccaaggtcctgaagtggtagacgtctgcgacttgctctcctcgcgtctttattccacaaatttttcatgattccccatttttgcactagttctatgaaaatagctacgatacttgccatcacattcaattagcgttaaaaaccatactttgtcaatcgttccaagcaatcaaacccagaaattacctgaataaattgatagagacgaaattaatcaactcttcaacactatttttcacacttcaaagtagtcaagcttcatagtctagcgctcagctttctcaactctaataatctcacattacaccacattacaccacatacaacttacattcgtcaggacctctttgaggttacggagatgtgaagatatcaaggatcgctactggtaaaggacaactcacttactgcaattacacaatttcccttcgatattaccatatctagagttagaagagtctactttggaccaaaacacaagatcgcatcgatatgtaagtcatgtcatcttcatttggaagggtatgtataagcgttgaacgtatatagggtatattttaaaatccccagggcacatcacaaattatttacagactagccaactgcgaccgtttcccatcctcatcgaagtaaatcttcttctctgtaaccatggactcctgcagcgcagcaccaatgcgaacagccttgacagcattctcaagttcaagaggcagtgccgtgttatcaagacagcaagcagtgaactcattggcctcggtaacaaacgcatactcgaagcgatcatagtagttctgggggatctccctccggacgccggtctcatcgtagatattaacgtggttcattgcaggctggttgttaatcgccagctttcccttggtgccgataatctcagtgacatcctcctggccagcggccatcatgcgggaagcatagaagtaggcaatacggccatcgtagaactcgaccaagccgacggcgttgtcgcggtcgttgtgcttgcgcaagtcgggctcgacggctgtgttgccaatcgccgacactgacttcactttgcagtcgttgccgaagaaccaaagtgtgaggtcaatgtcgtggatggagcagtcgacgaagatgccgccggagaactcggcgtatgcgacaaagaacccgctgggatcgagcttgtcgcaggtctgactgcggagtacggatgcagtgccgattgctcctgcctgcatcttctggtacgcgtcgcggtaggacttgtcgaagcgtcgggagaagccgcacatcaccttgagctctggcttcttggctgctgcgtcgacgacggtttgagactgtataagaggcgggttgttagtacttggtttcaatggttgattctttgtatttggtagactcattgaggttgagctggattcaaaatacaactgacttaccacttcgggacttgtggagataggcttctcgcaaagcgtgtgcttgcctgcttcaattgccttgattgcttgctcggcatgcacagcagttgccgatgcgaccaccacggcaaccagaccttcatgcttgagcatgtcgtcgtagttctggtacagggttacgccaaagggctcgaggtggattttggcccattcgagttcgacggggtcgggggagctggcagccacaagctcagctcggggagtacgctccaggaagttcagggcatggcgcttgcccatacggcctagaccggcacagccgatcttcaatctttgggtagccattgtatataaaatgtaaaggtcaaagaaaggatatcaagaagaaataaaatcaatagctaatagagagggaattctacaactgggcgacttcaagttataaggccgaaactaaatgcggaggtcagtctccgacaactccgcaaaacgtggggtcggaaagtgaattccaccaccgacgaagtcctaaaaaaggacctcgggacataaaaaaaaggctatcaactcgtgaattcactgccgtcggctttcttcgattcccgtcgcaatcttcgcttcgcaatatccactggatccgcaaatccatcacctctcagccaggtcaaagccttgcgtagtcccccaccctgcacggcttcagggttcccctcaaggattgaccccataagcgcccaggacagaacaaacaacaatagttccccgcccttgcggcccttccatagtccacgcttgaccccggtcttgtacgccgaatcaacagcgacccggaagaaccagaggaatgtgctgcgactgtttcccaggaacaagaatggcagaccgcccagtgccccactaaggaagaatcgcttggtaggaagcgttgtgcggggcaagttgtggttcaggagacagacactaccccaggctgagccaattgcagcagagataaccgctgtcatggtgataatacgcttcgaaatagtattcactgacgaaataggctgaagcagaatactcttgaatttggggattgaaagcgccagagtgatggtcgttaagaatcgcgcaagcggcggcacggagaggagaatgtggtgcaagaacgccgtgctacagttcgggagcttagggtgcaagagagcgcatgatagacttgtgattgcagggtgtgctggtccagtgattggagagatggaagctactgatgacggcaaggtgttgagatcaccagggtgtagaattggagaaacgaatgccctgtgtcatattagcgactatactcctgaacacaatcaacttcaaacatacggccagcggagatcagcaatggaggcaagagagttcacaatctcttctttctcgggccaggcgatgttgaccggaagcgactccggtcggccttgaatgtagctcggcgagagcctaaaaatgacttttccaaaccactatggcatcattttagcgaccgtgactcaagtaaaggaattccgaccacaaacattaggcgtagtctcacgatcaaacacgaaagcatggaagagctgggcaaacgagatcggcatcaacagccagctgccgaaccaccacgggcgcctatccagccagcctttcgagtccaggacattgaacaagaactccaagcttctggtgcctgtgtaaatcgccgcagtcaatcggagctggtcctgcggacagatgcctagcgcgaaaccagccagacttgcgccgatcgctggcgcaaagcgcgaggtcagcgcctgcgagacatacgggttgcgctctctgaatggctttgcatcgtcggtgcggaggttcgctcgcaatcggacgaggaagcggtagaggaggcgatggataagaaggagaagagagagagagatggagagacggaatttgggagatcggaagaggggcgttcgggtctttttcctgttggttggagcgactgttagtgcatgcatgttcctaaaagaggcatctgcgtagattaaatcgatcttactgtgaagcgccttggaaccgagtaatcaacagatccgccaacttcaacgcgattccggagccgacaaagactcgcagcgatgagcgaatagcggcttcactgtgtcgattctttgggcgagcgatgacatcgtagcgagatggagatgggagcttgttttggatggtaggggcgcgtctgaccactgattcatggaggaatcggtattctttggcgctgagacatacgcggaggacgtcgcgtaaggcgcgaggtggaaggtccagcgcatcccctgggactggagggttgtccgcagacatgttgttgttgatgccaagttagagcatcatcaggtgaagtccggggctgagaaggtcgagtggtccaatgcggagaagccgacctcggcaattcttacccgttggtcttgccatgacatttcagtattctgtcgatatcacgggttgtagccttactcaccatggaagctattgggtatcttggggatttcagaggccctgactacccagtcacattttgtttgtttctctcgtgtcatctaccgcgagaatggcttttccgcatacagtatctttccgacggggaggtgaagagcgaatttttataacaacacgactttcattcccacagacactatttgaatggacggtataacgagagtatcgggaaagcgaagccacaggacgatatgaaggtcctacaggacctgcacttctggctaggagacatggctgacgcatctcagctttgcctcgagcggatccttgaggccagaatcatcatgaagcttttatgtttctcatccttgttgctataacactaaggctaacaagatactatattcctttttctaggatgaatctgtccgatacgctatatcccaccatacatgttatgttgatgcgaaattacagtataactgaggtccggctcaacacttagatgccaccctgaattgagaaccggcataaaggcatttttcacctttgcccaagagatctgcctcgatatccatgagccggttgtacttagcaactctctcaccccggcagggggccccagatttcagatggcccgtccttaagcccacgaccaaatctgcaatgaaatcatcggtcgtctcaccagatcggtgagacacaaaaacactccagtcaaagctgtaggccaagttcgccctatgaataattagaactttatctctgggggaattgtaggggaaacctacgcctcaattgcttcggagatggtgcctatttggttgattttgagcagcatcgaattgcacgccctcttttcgttggcctcctgcacatatttcgtattggtaaccagcaaatcatccccaaccagttcaactggacattccttgttgaattcggtccaactgtcccaatcggtttcggcgaacggatcttcaagtaaaacgatcggataattttgcaacaatgagcgatacaggtctgtaagctgttttgagctttgcaagttcggtttgtcgtctttgaacccaatatcgtagttcccatccttgaagaattcgcttgatgcaggatcaatggcgaattttattctgccgctatatccagcaagagagacggcttgaaccaagaggtctagtgcctcatgaggctgggagatcggtggtgcaaaccctccttcgtctccaataccggtagcttgagagtatcagtaatggctgcgtaggatccatagtgaaaggcgcactaaccagatgttccatacttctcgacgatgaccttcttcaacttctggtaaacctcgcagcccatttgtactgcttccgtgaaagatgatgctccaacaggagcaatcatagtctcttgaaaagccatcttgttgcccgaatgcacacctccatttaggacattgaagaacggcactggcatgacgaatggttttttcgctccagactcacgccgaaggaactcgtacaatggaatcccctgatatatatcagccatcatgtcgaatcgtcaaccttaattatagcttacagcatgggctgcacccgctctggcacatgccatgctggcgcccaaaatggcattcgcgccgagcttcgacttatttttcgtaccgtccagatgcttaagaaggcaatcaatcatcctctggtctgtatcaaccttgagcccgctctgtactagagcgggaccaatgaccagtcggatgttcgaaacagctttctggacgccctggccgccatatgcagaattatccccatctcgcagctcaatggcttcattcgcacctgtagatgcaccagacggaacgatggctcgaaaggtacctgcatcggtgtaagaaccgagtttagctattgttggtgctctcttacctctgtccgtagtgagatcaacttgaacagttgggtgtccccgcgaatccaagcgctgggcagcttggaccgacctgatcatcgtgaattcgaaatgatgtagcgtggtgagttgatgggttcaaagcttagatgaccatcgcatgagaatgttttgttcttgctattcatcatccaggtacagtaaatttcacaatggcaaggggtgacgtagagtaactataaattaactgtgacaggtgatgatgtcaagcggatggcggttgattctcatagccagatctatagaccaacacttttctttattgtacgcttctgactccaatttactctcgggcaatctgagcctatcgcgatggctcattgtaaaataacttggtaagcaggatatggttgtgattattgtagttactagacagatccatagtatatatactgttcgagcggaaagttttgccgcgcctttcgaatccattacgacttcaagatgttcatttgaagcaagctgcattgcagttttgtccaaattcttcgcaggattgaggtctactgttttctggaagttgtccccaaagatcagctttataatacataaatttccgaaacgagctgtcgctatccggggtatctccttcttgtttgttccgatggtttatatcaaatcgattacccaactgcagtaagctcaccacaaagcagataatctccttcggtccttctactacacaactcggatagagcaactcgaacaccgcatcggtatcctatcgcgcttagcgaaaggagtgtatgcccataatcaagtacgatatgcttgaacagaatctgtgctcaggtcaggggtaactagataaatgcatacctaaatactccgtgcctatggagtccccctaggcatctttatttatgtatactaatacattgttgtttcactgcatatctagatatggcaccaatcaaacaaaagaccgcatgccaaattaaagagtggatttttgtctcagcgccacaaaatctctcgcgataagtcttcatgcacggagtatttggctagccctaaggagtacatcgagaaattcctcaaatcaagtgcttggcgtgaaacacaagcttgacggaactccacatggcttcccaggtatcaattccatatcgcgattggacaataaatattgcagcccagactgaaaccccatgtctcattccgtttacccgaaaatattccgggaattaattattccagcaatgattgttttcagcggggccgtacgtagtagattcggtggagctaaatgtttcggagagttgtcgtagccctaatagatgaatacaacggagcacctaacaattaccatgcatccatggatctcatggctctccaatgagtggtccggctggaaacaggggtcaacaccatgacagatggtgatgttcccgtttcataaggatactagcgcaggggctataaggaggatactgtgcaggccaagcatttaaatatcaaagccaagctcgatggaatagcttattcaaacccatccattcattcttacttcatttcattcttcattctattcggctagttccgaacatttacactctctttacttgtctgttgatcggacatttacttcaaaatgcgtacatctttcgtttccatgctggccctcggcgccgccgttgtgtctgctgccccagctcctactagtgtttccgaactggttgagcgctcgtcctcgacttgcacctttacctcagccgccagcgccattgctagcaagaaggcttgttccaccattgtgctggataacatcgaagtccctgctggcgtgactctcgatcttaccaagctggagagtggtaccaaggtagatatttctgttattcaagggtcgataaccaaagatctaatagctgctgtataggtcatcttcaagggcgaaactaccttcggatataaagagtggacgggtccccttatcagcatctccggctcaaagattgaagtcagtggacagtcaggccatgtcatcaacggcggcggagcgagctggtgggacagcgagggaaccaacggcggaaagaccaagcccaagttcttctacgcccactccctggacgactcgtccatcaccggcctgaacgtcaagaacacccccgtccaggctttcagtgtgcagtccgataacctggtcctcgaccagatcaccatcgacaactcggacggtgatactgagggcggccacaacaccgatgccttcgatgttggctcgagcacctatatcaccatcagcaacgccaatgtcaagaaccaggatgactgcttggctatcaactctggcgaggtaagcagtcaaaggatacttctaccataaaaaaacaaatgaaactaacctggttgtccgccagaacatcgtattcaccggcggctactgctccggcggtcacggtctctccattggctccgttggcttgcgctccgacaacactgtgaagaacgtgaccatctccgactctaccgtgaccaactccgccaacggtgtgcgcgtcaagaccgtctacaaggccactggtgcagtctctggcgtgaccttctccaacatcaagctgtccgagatctctagctatggtattgtcatcgagcaggattacgagaacggcagccctaccggtacccccactactggtgtccccattaccgacctgactgtcgagaaggttaccggcactgtcaagagcagcgctactgacgtctacattctttgcggtagcggtagctgctctgactggacctggtctggaaattccgtcactggtggtaagactagcagtaagtgcgagaatgtgccttctggtgcttcttgctagattgctagggatcaaacagtgatcaccagggcatcaatcagacgagagtgggctattttcaaggcaaatttgactgggtgggctagaagacgaggttaaatatgctactagtccctttggacgtcattgtacttagatagccatctgtagatggattcaattgaatggttttcagcctacctaatagtagctgagaatgactatactgtaaaacaccttaaattagcaaaattcactcgtagattcaatttcttatgcgtctattaatttctatctatgttgtacatattttgtcgcaactaacgccaagctgcacgttcgggaggtgcatggtgatgacgcaacgagttcctttccccaatcagccaaccctcaagcttcttctcttacacatacaaagccacacccaaatcatactcagaatgcatgttcttctactcggcggtcatggcaaagtagcccttcaccttactccactcctcctcaaccggggctggagcgtaaccagcgtcatccgcaaccctgcgcacgaaagcgagattctagagctgggccaaggccacaagggcaacctcaaggtgttactatcgagtctagaggatgtcaagagttcctccgacgctcaaaaaatcatcaacaccgttgtaccggactatgtcgtctggtcggctggtatggcaaccctcacccctcaccccgcacttatctctaaacatcgcaacgcaacgcacattgcaatgagccatccccaaatcaaataagaactcgaaaccatatagacctctataatgcactatggaaaatcaacaattccccaaaccacaaactaacacgcaaacccaggcgccggcggaaaaggcggtgcagcacgcacaatcgcgatcgaccaagaagcagcgaagcacttcataacagcatcatttgcatcaccaagtgtaagcaaactcctcctggtgtcgtacctaggcagtcgacgcaagcagccgagctggatgccggacgatcaatgggcgggtatagtgaaggtccagacggaagtgctgccgacgtacgcgaaagccaagctagaagccgacgagtacatgacagcgctggctgcacagcggaagcgcgagcctggaccggcgcggcctttccaggctatcaatctgcggcctgggattctgactgatcagcctgcgacgcggaaagtcgagctggggatcacgcctaagggtgacggaagtgttactcgggaggacgtggcgattgtggcggatcttttgcttgctagggctgatacggagggatggattgatcttgttaatggggatgagggggttgaagaggctgttgagagggttgcaagggagaaggttgatgctgttgttggggaggatgttgagggtatggtcaagaggttttttccttaaggaacaatttccgggcttgaatctctaggtttctatactagaaaaggcctgggattgacaggatactctactcttcggatcttccatatatcattcaattatgaaaacgaacgtgaaaagatataaagtttatatggtgtgcatatctaagaaaacatattcacagcttggctttgggtgcctctaccacccccttgaacttctgcttcagaatccgacgcaggatcttcccactagggttcttggggatctcatccacaaactgcacaccaccccgcagacgtttgtggctagtgaccttgctatccagccatttgataatgctcgctgcttcttccttttcgctccttccagaagacttgctcttggcgctgcgaacaacacaagccataggaacctcggaaccgtgtgtctcactctcaataccaataacagcaacatcatcaatagcatcattatcaaccagatgtccttccagctcggcaggaggcacctggaaacccttgtacttgatgagttccttgacacgatcggtaatgtagaaattacccttggcgtcctggtacccaacgtcgccagtctggaaccatccgtcctcagacaaacagcccttagtagcctctgggttctcgtgatagcccatgaacacgttaggtccactgacgtacaattcaccaacctcgccgacggcaacttccttgggttcggaaccatcctctggcatagtcatatacttggcttgcatattaggcatcaagcggccgacggaaccaatagcctcgcgccaatcctcccaccgctgggagtgtgtggttgggctagtctcgctgagtccgtagccctgtttgatgccaaccttgatgcgggagtaaactgcctctaccagctcatgagtcagcggtgcagcaccggagttcatcatgcgaagacttgaaaggtcatatttgtcgaccaccgggtgctttcctagcaatagcaccactggagggacaatgtaactgaacgagcagcggtagttctgcacgtgagcgcaccatttttctatgtcaaattttgacatgacgaccaagtggtaacccttatataaagcctgggcaagtaggcaattcaaccctagagactcacagttagtatcgtgttcatccgagcatctacgcgattgaaagctataccatagatatgatagaacggcaaaaatgccagtacccgatcaccctttccgtcaggaccaccattccaactaaggtttgccccttcagcgatgtactgctgcctaatattggcaacgatattccgatgcgacagcatgacacccttaggcacacccgtagtcccagaagaataaaccaagaaagctacatccttcgcgggagtgaccttctgcttgcggtagcgagtagcaccagagatattgcgcacagagctaaaatgcttggtccgcacatcgggatcccgctggtccccaatcaggataatgcgatcctcggacaagccgactttcttcgcagcttcccgcgcaacagacagcaccgaggcctgcgttacaagtcccttggcgttagagttcttgagttggaaggccagctcgtcaactgtgtagcctggattcgcaggcgagataattccgccggcccaaagtgtgccccacatcaccacgggtgtgtcgatgctgtttggcgtgaagagggccagcacatcgcccttgcgccactcatacagagctttcaggcccttgccaaaatctagcgaggcctcgcgtagcgatttgtatgtgtaatggcgctgggtatcggcatcttgatagataactggtgggggtcagcatgaagaaaattcaagagaaatgcaaatgccgtgttcaacgcagcgcaccactgggttctcattgaatatcacgcactcttatcgtcggggtaagccctatccttgcgctcaaatagaaaggtccagaggtccacttctgggatgtcgaccagagggtaattggaggcgacaggcattatggaataataaagccaaggattcgatgccggggaatgtgatcgaggctcaaaaagactgtcaggtggaagacgaaagggacgcacacgagcaaccaagtatgtacttaaaagaggtgagatgggtctttctccgcaatctcggctgacggcttgcctcggtccaatatcgcgggggcccaagccaattaaaaactgcttgttccttgactcttcggcattagattggaggaactgaaagatccaatcccatactgttcactgcatattccgaataatcatctgttccgttgaggttcatgcaggatactcattgatatccttgacatccatccttgatatcggcactcagagacctcgatctcggcagtttgacagagataagcaactacttcaccgaatgccggatgaaaccttggaagatagaggaaagacacttttatagaatagctcagatagaataataataaggtctggtgaatggaacatcgcaatgtcatgcccacctggaacctcacaatttgataagcatcagcttcaaaccttcgaagtcaggtaatttgatagtgacctgaaacagtttaatgcaagactataatacacaggacgacgtggagcggcctactcattcgggaagagaccgttgtaggaatatatatatgtgtagctcgagatatgtgtccatgatagcgatgcaaaggtatagaatgtgctgccaatgattgctagtttatattccattacatttacatacaatgaggctcaataaataaataaattggatacccacgatgcccccttccccagagtaaaggtagcggagcccaatttgtggaacaattcacagtaatgtgtacaacggtgcagtccccatgaacctcacgacctagacgtagggaccatgagacgggcctgtcgggtgctgtctagtctgcccctcggaattacttggcctacaatgtgtctggaaatgaatttgtagtgtcgttagatttagactccttccccggcgacacaaagcgagacgagtgaaggagtatctttttgacctcgtcagattcgacgagggactaaatccagatcccaatatgatttcatgccgacaagatcttaaattgagttggaaacagcggacccagactggaaatacatgctgaaaaaaagagcccagatgagagttttgctgaattccatttttgctttcccagcaccatttcctccacacgccactccgaggggaatcgtttgaaatcgtttacttgaggggaatgaaacgggaagagtgggtggcaccaataccgggacgaccgtgcttgacgggcttgctaggaggttgttagtgtgctgatgttaaatggccatgcgaacaattcccgggagcacatactaagagatagagaactcagccaagtagtgaccaaccatctcgggcttgatctcaacctggttgaactccttaccggagtagataccgacaacggagccgatcatctcggggacgacgatcatgtcacggaggtgagtcttgacgagatcgggcttctcgttgggcttggcctcctgcttggccttgcggagcttcttgatgagacccatgggcttgcgcttcaggccgcggttgaaacgtctgcgggcacgggcgtgaacgacatcacggagctgctcggaggaaaggtcgaggagcctgtaaaaggattcagtcaggataatgtccttgcttgtttatgatccctgttgtccattcgcaacgcagcgacaaagaggcgagaataaagatgccatatgcggttcatccataatggttgttgacattgtaaatgaccaccttcaatttcgtctcacgaggtactggctgcgaatggatgtccaaggattcgatgattggtaatgtaaacatactggtcgaggtcaatgccacggtaagaaaacttgcggaactgtcttctcttcttgatctctgctcggcgaaggttcagtcagcgtctgcgatcttgctgtagtgcgtatctcccatgtccatgtcgttccccgctaacgtctttcttcaatcatctccgtatagtcgattgtaatgcgcgccgtctcttctcattcgattcttctgtccatgggcgatgggtagggatgggtttgcttgttcataacgtaccggcagcctcctcggcgttctagatgaaaactccatgttagtgtatcgcacgggcttgaagggcgagggcgaaaaactcacgtattcgatgtcagccatttttgcagatattcctgtaaaccgcctttcgaccgtatctcgaaaagcgaaggagatgggttgtcggaaattgtcgtgtcgctaagcggtcgggctgctaacacacaggctgtaggaggtgggcagcactcgttaagcgacgggtaggttccaagccctagacactataccctttcgggtgatacgtaatttactttgaaacattggttttttctttgtaatcaaactctttgtattttttatttacttgactttgcttggggaaacatcagtagcgtttgtaccatttgtgtaatttatttgtattatgataacccattcccatgatatggcagaatcggaggctgttgatggtccttatcaaagtacaatctgagtacgcttactccgtagttaccatgacgtggatgattgaatctctagttctccaagagaatttgacacgctaactttgagagcgggtctcggcgatcattcaagaactaaatttacgcattgagaaaaagttgtagcgaaggccagacgaattgtattggctataagcttattccagctcacatgaagagtcgcaactgtatcaaaacagtctcaacaaaacacacttgagaagccaaccggcgcaaatcttgcccggactgacgaaccaaccaaacatctgttccccagaactatgatttttaggccttggattaaagcgcttaatcgaagagtccgaatcccatatcctcatcggactcctcctcctccttctcctccttcttctcctcagcaggagcagcggcaccaccggcagcggcagcggcaggggcagcagcagcaccgccaccggaggggacggaagcgagcttggcagagccctcggagatcagctatataaagagtcagcatgcatttcaggtaatatatatgcgcttgcgagtatcactgaccacctggaggtccttgtccttgagctcggagatgaccttctcgacgcggtcaccctcagcgtcgataccgacggaggagaggacagccttgatatcggcggcggagggggcctcgttgccggcgagggcgaggagcaagtaggcggcaagatacttcattttgaatggactggaaaaaaaatcttcattagtatcgaattcaagatcgaatgcgatcgtacttttcaagccgcaaaatcggctgagaagcacataaataaagtgtacgtaccgttggtgattattatctgaacaagagaaacaatcgatttaaccgcgaattgggcggagactgcaacgtcgagttctggtggaagaggttggttgacgaaggattaaccgagtgctcaaaatcttggaaaaaaaggtggtgcgagtgggtgtggctagtgttggcgggacttctaagcgagtgctgtggcgcggtgtattcgctaccacgtgacctttgcatatccggccttgataattgcatgctggcccataaacctgtctctcttctctactcctctactgagtacataactctcacttcgaaagctcttgggccaagtcaggcgtgttcttcacatttgctacttctgttatcttggaataacagaaaatctggagagagccaagccagagatctattctcatgctatcgggctcggagtcatgaagttacttagtcgtaccaaatatcgacggtgagcgacttctttttgtaccactcttcgaatccaggatttaaatcctcgggatatctctcctataatcaaaatgagtgtatggccacctatctttctcttcgtttcacctcattttgactgacatagcatagttcctcgattccattctctcgtctatccagacgggtaagccctcccaacttccggtgactcaggtgcctacctcgcctacacctacctcgcctgcgcctgcttcaatccccaaaaaggaggatcgcaaaccgaccgctgtgcgacggccgccctcaaccagcgggaatgtcagtggagggatcaagcgcaaagctgatgaacagctgcctcgcccaccaaaaccagaaaacaaggtggcaaatagctccgccgcaatgaggcctacacttcccacgaggccagcggtatcatcagtaccacccagagttgtatccaagccaaatcttccgaccacctccaggccaaccatgcctaaacccacccccaaacccagcttgtctgcgacgccaaaagtgatacccccacggaaggagcccgaccccaagcccgcatccgcaggcgctgccacaacctcgaagccgccaccaaagggatcatttgcggagatcatggcgcaggcaaaggctaagcaagagacggcgcctgtgggagtagggttgctacgacaccaacccggctccaaagaaagacttaccaaagtggagcgcaagcggcgcatgatggaactccaggccaaggaaaaagaagcgcgtttaggtaggaaggctggatccggtgtctctgctaagggtaagcctgctgtccggcagcgcgattccgagggaccctcatacaaggggacggccaaaccgacgcaaactcccgaaccgcttacctaccgtggtaccgcgggcctgccgtcaaatcgtggtggaaatgaccgtcgacaccagtctcgcaaccgacaaaatgaatatctcggaactgacgaagaagacgagggcgacctcggtggctacgacgattactactctgatgcgtcgtcggacatggaggctggaatggatgatgtagaccgtgaagaggcggctgcattggcatttgctaaacaggaagacgagaaagagctacggcaagaaatggcggctaagaaagagaagttggagcgccagcggaaattggccgctcttgcttctaggagcaagcgttgaagtttggacattttatacagtcaactggtttctttttttccttctgatcactttccttgatctcttttgttttggataggactacatgttaactccgcattatgagcgttcggggtgtccatagacggggatgccttcatttttttttgctttgaagcaccatcaatagcgagcgctatatcaataccaactttcttttcttttgactattgttctgtacattgtagccaatattcaatattgaagtcatcggcttgatattacaaccccggccccacttggcaggtgacatcactcgcgttcacctccagcataaccttgaaagtaatcttctacaatttcacaatttcaccatttcaccatggagtcagttcatcatgtctcggtctcatcgaagattctcttcagcaaggtgcgcaagattgtgcctccaatgctcgaaaagttccacaaaggtctgttgattatgttgataagtcgattgaagctatcgaccacgcaatgaaaatccccgctgaccagtagtctaggacaactcggccgggtagctgttatcggaggctgcgttgagtaggttgtctgcctgttgacactggtatcctactaactggtataagctatactggggctccatacttctcatccatggcctctgcaagacttggtacgtttcctaaacaggcccatgctctccactagatatattgactattgaattgcagggtgcgatatggtatgtgcgaaagatggcataccttatgcaaacgactaacaaccaccagagccacgtactctgcgaacgatccgcagcaccagtaagctaaaatccggccttgattgaacctactctaaacatgtagtacacaggttatcaaaagctactctcctaatttgatggtacacccattgcttccaagcagcgacactgtcaaggaccccaattcgattgatgcaccagcactggcgggtccgatcatcgcgatgttatctcgcctccatgcacttgtgattggaccgggtctcggccgcgatggcgtgacgctaaaggtagtcgcggaagtgatcaaagaggcgcgggcgcgatcgatcccgtttgtgctagacgcagatgggttgctgattgtggcgcaagacccgggcctggtcaaaggctacaaggactgcatcctcacgccaaatgtggtagagtttgggcgtctagccaaagcgctgggtgtcaaggtcgtcagccaagcggagattgcgcaaggcggaaacggcgacaccatcagcaaagcatcagatgagtgtgagcagctatctcgagccctgggcggcgtgacgatcattcaaaagggtcctcaggatttgatatccaacggggttactagcattatctctgataacaagggtggcttgaagcgcagcggcggtcaaggagacactctgaccggatcactgggcacattccttgcttggcgagcggcttatcatgagaaagtgtgggactctggggagcaggataacgagaaggcagcgcagagcaaggaagatgttcaagcagagctcgattctgagaacaaacgcatgtccccgacaacgactctgctattggcggcttgggcaggaagtagcattacacgagagtgctcgcgacgagcctttgaagccaaagggcggagcatgcaggccagtgatttgaccgatgaggttcacggggcgtttttggacctgattggagagccagaagggtctaagacgcacctctaggctaccatataaaatgctactagctattcatctatgtacgagaaagacagtgcagcggtatactccggagcatatctccatgtacctaagcccagctgcatgtaaacccacggcaatgaaacatgtctcgtccacttttatgatggctctcacaagcggtgtctatagttgccaagaagaatagtctcgaaccctgcatatcttagtcaaaatctgtctccgatattgcaatctcgactgcactgacttacgtggtgttatatcgtagcatagggcatcttttcttgcattttacctgagataaagaaactgctcatagtatgcgaatctttcagccttcaataatccattatcaacatggtcaaaacccgtcttccggtgctgatgcttgagactcgggcctgagtctggtcccagttaccaaccattaggtgaaaatataagactaccagccaataaaggtcgtctgacaacacgatatcatcaccagactcggatgattggttttgagcgggtccaacaaggattaagtgtgtcctggttggacaccttagacccttacccttgatggcatgcagagcaatagaaaccaaaaataacatgtcacaagccctgcctcattccagactagcctatgcccaactttcgcggtctcgcttgttttcacctgcctttatcaggttccaaaggtctgcagaagacgaagtcatttgcataaaagaatgcccagcttgtaaccataaatttgcaagcagtgtgagacatttaccttggcaagtcaaaattgcacattctatacggccgttgacgtcgagatctgaatgtggctagagggatggccctgagacatgcaccccgcctccacccttgctaattcgatattccaaaacctaagcagtcttaggcgtgctgctcaaaggcaatgttgggctaataagccatcgacatcaccttggccgatgaacattggtggtgttttggggtattgttccagatctcgtattcacgcccaaccccgtaccgtatatggctataccaggaaacccaggcggaaaatgacctcgtgatgcaacgcagggaacagggtgaagaacgccttctacaacaaaggagaatgaagcttaaggattcgcctaagcatacagatccttggaaacgagtatataagatggcgaatctcccagcaaaagataacgccatcagaaaccaatccccagacacaagacaccagatctacaagcccaatcatccatcaatatgcatttccccatcatcaccttgatcctcgcgactgcctccctggtggccgctgacccaacatcagggccccagtgtggcacctgcaaccccatctcaggcgagaacggatgtgacccttccacctcgtgcatcaacacgggaacatccttccactgcgcctgccgcgctggtttcaaggcatctcagtacaacaacgacttgcaccatcagttccgcctgccgatgccgaactatgaattccttgttttcgttcctgagtacacggcttgcaacaccccgtgtgatgatccgtatgctgctccttccgatctttgcaacgaggtcaggcttcaacaccagtgcgcggcttagaatattggtccgtggtgggagtggtcaaacaagatagaggggtagtgcagtaggctcaagcggaacctatagcgagatattctggcgggttttctggcggattgcatgtgtacatgggtcactccttaatggaaagaatttgctttagtggagaattagcatgtaaatgtagattaaacaagtagactgagaagatctttcctaattcatctcacgaaatcataataaccgactccatttccccatgaatatacccaaacacccgtcgccttaattttagccagtttcacatgcatcttcaacacgtacaagaagtccgacatcaagaaaacaaaaacaaaaacaaaatgtgagactttcacaattacatgtccatatcgtcatcgacttcagtgaagagcagacgcgtgccgttgccagtgacttgccagagctatagagaacattgttagtaaaaaagcacggtacatttgggagttagccacacttacgttcatctcggcatattcatcgatagtcatggtgaggttatcttcagtgaagcctcgggccagtacacgctcacgaatacgtctcatgctcatctcgccttcctctccatctccaatggcagcggcaccactctccttcatactacggatcaaattgtagatcttgctagatggggtgttgtcgctaccctgctcgccctcactgtatagagaagccttactgatctcaatgagacgcagagcctcatcgacatcctcgcgaacaacctcctcactgaagcgaagacgagcaagtgcctgcgaaagacgaacaatgccgagcagagtacggggactgacatgggaaaactgtctcttcttggactcatcgatcttttgtctcttgcgcatggccacataagcaccaaccatgtaatcggaaacattggtaggcacaataggacggtagctgcgtgccttggcaacatactgacggacctcgtggggagtgaatagcacgccagcttcttcactctccgggtgcttgttgtgcatgtggacgtaggtgacgtgttgggccagctcctcgtcgccctcgcgggacggggtatccagaagcaggaacatgacatcaaaacgagagagcagagcggcgggtaggttaatgttctccacaggtgacacccgagggttgtagcgaccatatagcgggttggccgctgcgaggatggaagtgcgggcgttgagggtagttgtgataccagccttggaaatggagatagtctgctgttccatcacttcgtgaatagctgttcggtctgagtcctccattttgtcaaactcatcaatacagcagataccgttgtcagcgagaacaagggcacctccctccagcaccatctcgtctgtgacgggatctcgcatgactgcggcggtgagaccgacaccactgcttcctcgtcccgtggtgtacacgccacgaggggcaaccttagtaatgtatcgaagaagctgggacttggcgacaccagggtcacccatcaggcagatgttgatgtctccacggatgtgcatgccgtcacccatctctttcgtgacaccgccaatcaagagcaataacaatgccttcttgacatcaaggtgtccgtagatttcgggtgcaatcgaccgtgaaaggtactcatacatattaccggaacgttggtgttgctcgatcttgcgaagagtacggctatccatacccacctcattgtaggacttcttgtgctgtgtgatgtgctgggcatccaagtatgtgtcagtcagcaggccggcgcgaatagcccggaaaccagtgtagggagtgggcaagaagatgcctgccacatcgataacgtcgccggggttcagttgacgagtcagagcgccgtaacagtgaacagtcaaagcgcgaggaatatggcccacagggacctggtcggccatttcctggatcttcacttcctggaaaggaacaaacttcgatgcacgagtcgacaggaagagctgacccttcgagttgttcttcttgcattcctccgacaaacattcggtcaaggggaggaattgcttggtggtgatgggctggaacacctcgcaaccacagcgatcgcaagtgtaggcgttgatctgtacagctggcttgacatctgagacacgggtggtgataccgcggactgtaatcaaggtgccgatgtgctcaccgcgtacataacggacggcgagagctttggaatcgcgctcggcgctagaccctgagggtgtgaggggcttgaagttgacagtatatctgcgggtgagctccggagggaacatcgatggggcagtcgcagcagcttccatgtcggcctccatcgcagtttccatagtctcattccgcttctcgcgttgagacatgatcacatcaagcacatcgtctttgaatctgcacgataattagtttagcagtctgtgcattcacatataaacagatttgacatacgtgacatcctttgtctccctgggcataaccgcatcaatcgcttgagagatgacatcgatatagcgttttgtgttcttttcgatagattggacgagcttcaagtcttctccctcgggcaaggatttctcgaactattaccaacattgtaagctagagtttagtcagaggggctcatattgatacttacaattgacaggtcatccaactcaatcaagatattagatttatcccggtttgcgatatcctgcagaatttgcatgtacttgagcttcggctcccggtgcctccttgctcctcgggtgtttgccccattggtctcatcggcatcatccatgaaatcatattcatcactagtcccgtcgtcgatgttcagatcctccaatgcctcggtcgcagcggcttccgaagacgattggaaggtcttgaaccccttcaggaaatccttgaagctattcagttgcgcggaataatccacaggcggggggtattgaaggagagacataatagcaaagtgcgctcaattgaaagcgcaaagaatggatagtgtgatcgggagagaatataaggaagagggtccgtccagtgtctatcggagccccaaattcgctgggtaaaacgcgaacgcgaggtcgggacgcgctcaaaaacgggactaacccatttaggaaaggtatcaattccgacggattatcactttatccgctaacaatatatcacatgactcgtcatcgggccgaggcgaaagagagatgtagtgtggagtccggggtcgcgtttctacgagttcacgattcgctctcctccttgtctttccggggtccacgatcgttcagcgcttcaaaatggcgcccaagaagcctgctgcgacggccgaagtcgcccttatccccctaaagaactgtcttgttaatctaccgccgtcgctggtcgccctgctggtcaatgcaaacacggtcagtctgctagttgttctgtttccgtaggttatcttcggctaacttctagctataacagactgctcagaatgttattatcgaattacaatataaatcgacctccggaaaggccaatggagctcctccgcagcaatcatgcttcctcggttggacgggtatgccgagcaagcgcaggcttgcgcctgtcgttgggagggacggtatcaacagtggatattccagggagcaggaagtatccaccgttgagcttgatactacttttgggcgactccttggtctcacagaaggccagaaggtacaatactccccgtgcgtcattacccacgtggggcgctaacacttgcaggtcggattgttcatccacctcgatccacccgttgcacatacgataaacatcgagccattgacaccagaagactgggagagtatgtacaagctacaagcagctataattagagtggtacttactcgatataaccagtcattgagctccatgccacattcctggagcttaacctcttgtcacaaattcgcgctctacccaatcctacatacaatgcggctcaatcgatgcatatgcacccactcgcattgcatctctctcccacatctaccgccaatattgtcgtcacttctcttacacccgctcccccagatacctcccccttcgccaaaatcgcgccggatgcagaagtcatagtggctcccaaggttcgatctaagacgagtaaaagctctcgggctgacagccgcagcgctactggtagcagcaggaggagtgctggtgggaggagtgcttcgagcactgtacgcccgaagagtggtcggtccgactccagtacacgaggctccctctacttgagaggcgtagaccgctcagcgaccactcaatattttgacgaggaagtagaagatgacgcaaatcagggccttcgtatttgggttgatccggatctgctggctagccatgagctgcgcggagcgacttgggcatgcgtgtcggttgtccagccatccggtctcaaacccccaccagatccccaacagcaacttgctcaggctgaacagcaaaagtccaatgattctggtgcccctgcaaccaagctcgtggctaaattgtttccatgggaggaggctcctgacaatcggcatgtggcgctttccaccttgttgtgcacggcccttggtgcagagaacatggttggaggaatcatccgagttgaagcagcacccccaccactgcatcgctcggcagtcaagaccctcaaagtctatcctttcataggcgactctttaaagaagaaggacgggctgaagttcggtgccgacactacggcatctcgcgatgccctagccgagcgcctcaaagtcatctacggcagcactgggtccgacacagggctgttctcgggacctttgactgatggaatgattatacccaaatctgactatcacccttcagtctcttcgttcgatggtgctattattcgctttgatccccctttgaagggagctcctgacgaaacaaagtcaatgtttgggtggttgctaggctccgaagccaagctgaatcttgaagtgcaggctgaaatccccaagccatttgaccctagttcgcaggcgctacctatggaggaccctcttccagaaactgcccctgaattagtagggattgattctctcattgaacagtcattgaacaatctaacaaagtcgtcgtctatcttgctgaccggtggtcttggtgccggtaaaacagctcttgcccatctactggctcatcgcctaagacgagatcatctcttcaatgtcaagtatttctcctgccgcaagctcgtgacagatgaaacacgtatttccaacatcaaagagaccttgaatcgcctcttcatgtccgcatcatggtgtgcgcgtcttggtggccagtcagtcgtgatccttgaagaccttgacaagctctgcccagcggagactgaattacaggtgggtggtgacaatggccgcagtcgccagaacagcgaggttatctgctctatggttcgagaatattgcgcgctgaattcctctgttgtgctactggccactgcacaggccaaagagtccctcaataatgttattataggcggccatgtcgtccgtgagatcatcaatatgagatcccctgataaggaaggacgccgaaaggttttggaaaaacttactagcgaagataaacccacggagagcttaaatgggcatgtgagggccacaagctcctcaacacaagattcatggttggacccttcaaatccggggagccgaccaagctcttctgggggtgatggatttgttattggaagggatgtcgagtatctagaactggccggcaaaaccgatgggtatatgcccggtgatcttgtgcttctcgttgctcgtgcgcggaatgaggccctcattcgctctgtctcagatctgacagcaacatcgaagatgatcactctagggttagaggactttgaaagtgccttgaaggactttaccccagcgtctcttcgaaatgttactcttacctcgtcaacaaccacattttcgtctgttggaggtttgtttgaaactcgcaagatgctgttggaaactttgcagtatcctacaaaatatgccccgatcttcgcacagtgcccattgcgactgcggtctggtttacttctctatggattccctggatgcggtaagacaatgttggctagcgcagtggctggcgaatgtggattgaacttcatcagtgtcaagggtcccgagattttgaacaaatatatcggagccagtgaaaagagtgttcgcgatttgtttgaaagagcccaagccgctcgcccttgcgtccttttctttgatgagttcgacagtatcgcacccaagcgtgggcatgactccactggtgtcacagaccgtgttgtcaaccagttgttgacacaaatggacggcgcagaaggcctctctggcgtttatgtgctggcagcaacatcacgacccgacttgatcgatcctgccctccttcgtcccggccgtctcgacaagtcccttctttgcggcatgcccaaccatgcagaccgtgttgatatcatccgatctgtgagtgaaaagctcaagatgagtgacgaagtcacgtctcgctttggtgatattgccacccagaccgaaggattctctggtgcagatctgcaggctgtcgtgtataacgcccatctagaggcagtccacgacacgctaggtgaccgttctaccgatgcagcgaagcccaattccaagtccaactcctccgccaatgcttctagcaagtccttcatccagttcctctattcctcttcagaggaagcatctgggtctgtctccatgccagccccagcagtgatttcagccaagctagaggcaatcaagaactcacgtcgccgccagcgccagctcgagcagggactttccggtgcgaacaacgccgcggccccggtggctaacggcactgagcccgatgcagacgagctgcatgaggatatcatcgtccgctgggaacatgttgagcgctcattggcaaccacgcgtggttcccttcccccagctgagcttagacgtctccaaggaatctaccgtgagtttgtggccggccgaaatggcgagatgcccaacggcgaggctgccaatgagattggagggcgaacaagtctgatgtgatatattttatgacttgttttgtacactgtatatatgaacgcccttgtatgttcgattgattatttgccttctactcctgtatttatcaatattggtaaatggaaacgtccttatacatttgagtctcgtcttagaggattattagatgagaaagggatcaagtttatcgcaccgatgttggcttgcttgcggcaattcatgaagctttgccttgtagattgggttgctttacaaaagttgaagtactagtagcttagggaaagagaatatgaactagttatgttcaaagcggaccgcaagcagtcacagtatacataaacacctccacctcaccgtggtgccgtgggcggctaccgcctacgtgacccggcagcccatattaggaggaggcctggaagtaggggagactcacgggcaagctttttgccttgcccaatacggtttgtaggtagtcggctttctcggttatcatggatgtgtatattttgatttgttctctcttgctgtcctggagaaagctatatactctctcatcagcactaggggcttgtctgtctagccgacacaaagtccgtcacttctgttctaagccgcgagtcttgctcattatcttctgtctttccagacaatccaaaacagcccccagagtagctagtccaatcaccccacagcagccagtagcaatttgctttttccaggtattgggatcactgcagttctcagagcagacaggataggttccgtttgtagtcattttggcgcgtctggcatgatagctattttcagcagtccacatgtgagctgcgacggggcagcgcagaaaagacgaattcgtaaaagaggaggtgttgcatgggaattggttcatgtaaaggctggcgatagcggaatatcgtagaggtggcgaaactatttcggtccttgagagtcagagcttgaagtacatatgagccctggagaggcatcagactcaccatactgcgtgcacctcgtactgaaaaccagaccaagccccggagatattacctaaccaagctccaactgtacatcgatgaatcaacattgggaaccaaactataggtggaagagatgaaattaccagttgacgagctcgtacccggtggtcaaaggcaatctttattggatctgctattcttgacttcctctgcatggttcgggctgcagaaactatcgataaaggcgtttctgatagctttcggcaccaatccagggagcagaacttaaagccacgaggcctatatgtcatattgttaggaatcagaactgaagactaaaccagagagacacaagccttaccaatgggcagtcaactcctcctcgagcatcagcccccacactacagaaaccccccccttaccatcttcaccgaaagcactagcagaaagctcacccagaaaaaatccaagttcacttattggctagctgccgaactctggctccagccaagtcaccagcacaagcgacacccagggaccctatcagaatcaaaagtcagctgagtccaatccatcttagatagaacatgtgaagcgagaaagaagcgagaagaactgggatggaacttaaaccaagaaaacaaaggctggaagaggtaaaaattaagttaaatggacttaccaacgtcgccggcgcggcagaagactcggagcatcaccacggatcaagattggggcgggggtaggcttgccccggcgcgccgcaatcgagcccatgagcgcgcgagcctgctgtcgctgacggtgggcttcataccctgggatctgctggtaagtggggggaatcaccggaatcctaatgtcggcaaaccaggaggtcgcagcctgacggctgagcccgtagcgggggtaactacctgtctcgagagagacacaaacctcatcggtagaacgggaagtcggaggtccattctccatggaccagaggcccgacaaggaaaccatctcgaaggcatccattttgcaagttgttttggttatcaaattgcctttgtgtgcaatgaaaaagaaggagaaaggaagagggaaagtgaagaggaagtgaagggagaaagaaaaaagcagaagagaagagaaatgggatgggatgcgggctgtttacggcccaaagaggaagggtcgaccgacttcagagccgaaggggcgacaaagtatacaaatggcatcggctcgtagtcgctcctgccatctcatgcataagaggtgggggactattaagcacgcgggcactactgtcttgttatgggtctattcaattagggctggcggtgttgcagtttgatcgaattttgtagaataaacaaatggcttagagtatttcactctttctctagagccttatcaacaagacgttcaagcttgttccattcagcggagagaacagctttggtcttgctaggatcaatgccattggctttgaactcattgtgaacctgcagaaactgatttccaacaagcctcttgaagctaggcacggtgcagctctccgcttgggtgctagtaagttcggcgagaatgtaccatatcaagtagtgaaagttcagcttgaagtcatgaatctggacagggtctttggggtcaggttggaagccctcctgagaaataaaaacagtaagcctgactaggctccatgcatggatgtgtcggattggatgggctttgtcatagacaacaggatcaattcgcaggtatcgaatggcagcgtggatgaatgcccgggtgaatttaccagccgttagcagagatatgatgagcttgtcgcgcagagaagcatatggctgacgggtgagaggccatagcgcagtttcatggagcttgtgcatagcagcttctaatttctcgattgcgtctgctggctctgtgctggttgctgttgctttctgcatgagttctagggcttcacgctctgctgtctctagggaagtcatgtcttcaggtatagacaagaaccggtcttcaatggtatctgttcccatctggcactttgtgcactggcaatcaaagaagtagcgttctttcaattcgttgcgacggatatcgtatggtgtcgtggtgtcgatgtaggagatgaatatttgctcgccctttttgataggacgcatagctttgacgtatagttcttcaccatcaaatcccacagtggagttataggcgcagctgtggttgatcaggccggcatatggatgcatgtagaggccaatgcggtcatacatggaggtggtaaggttgaaggagttgagatcaagctatgatatagttagacaaaagtccgcgatgaaaggtgtaaggctaaaaccaattaccttggcagcataagaagcgatagttccttcatccacatccgtccctgagtaattcttgacagctcttgccgtcaggttaatcctatcaagctggccttggctctctgatatctcgttgatatgagtctccaagccatcaaagaccttgaactcttcagcgtcgtatttgctacgcgcagtgcgcagtactacacgtaggagagcacgggcattgttgggaagaaccataggcttgacttttttgaagatggggcattcaagagaatgcgcgaacttccagtccttagattgacatacctaaatcaaatattagaatatcaaaccagtaatctttggtaggacaagaaatatgagacagcaaacagtatatcgtatatcccattagcaactcacccgatcacaatacttcacgacacggcatcccgtgcaagcctttaactcatttccagtttctacctgtctctttccgaagcaaccagcacaagtgtcctctaaacgtggggaatcaagaaccgccacaaatggtgttttgatgtgcaaaacatcttcaccggggttgatgtcggctgtcgcaaacagaccgttacccaggccattgggggcaggctgtgggaccgttctggtcgttaccgaaggtagtgcaattcttgatgccattttaggtgatctgaatacaggaataagaatgtttgaagatataacaattagagtggatagtcgtccacacgggcagggcggtgaatattcgccattgtatttgaatatcttggcattaatagtggaagattaatagaatctccaacataccacaataaagagcagtcacatggaagacattgagatttcccttgtggttttactgcttgccaattcagcttaacagaagctagaaaccagctctatctttatatgcaaagtcgcgacatggtatgaatcgggcaaagaaatactcctacaaatccttttaagcagaaagccataccaatcaagatgaatatttggagccaaaaagaatcagattcgaggcgctatttaggtaaattactaggtggacatatagcatagctcattcaaagtgtataaacccagagactcaagtcccaataaattaaacatcaggcatgaaaagaacatgaaaagaaccaaactcaagacctagagcatagccgcaaaagcagcagcagcagcaacagcgcccaacggtgcagcagtgatcagaggcttggcagcagccgcagcaccagcagtagaagcagtaggagtaatcttcaccggtgtagtcgaacccgtcgcattagccttgaaagcgtagataccatcggtgacagtaagagggtgataaataaccgaatacgacgggatggattgtgtgctcgaggtggaatcggaaatggtgtgatcaccctcggaggcagtgtactcatacttccacgtgcaacgagcagattcagaaaggcgggtgaaactgcatgactcgactgcggtcgcttgagcagtcgcacccttggtcacgacagtcacttccagggagacgctgtaagtcgcatcgccctggatcagggttgcggggcggttcagtgcgcacttggatgcgcctgccatgcaggcgatctcataggtcgtggcgtacttgtcgatgccagcaactcgggctgcgatgctggagtaggcgccgatattggcgccgtagggattgtcaattccgaaatagctgacggttgttgtgctgggctcatcagcggtagtcagagccgctaggagagaaacgaggaaccaagatgagcgcatatttgcaggattcgaagatgagggatttcaaggttgtgagaatagagagaacagggttgggcagaagaaaaggagttaggaagcaggggaagtttttcacagtcactgttatgttagctcatgactagcgtgcccgatgggcctaaaaagagttacagagttccgcaagccaagcatcgctcgtatacaagcgctatacttggcacttggcactgacaagtaatttcgtttaagggctgtggtaaggaaccaaagacatatcggtacagatcttgagggcctatggttgtgacctacaagcatcagtcaagacctaggctatcttgaaggtgaagaagttcaaggtggcatttgaaggcaacaaaatgatggctcaaggacaatagaatagaagtcattagtcgcaaaggtcggcaaagattgctgtcacgaggacccgtggaccctatcaagccctttcaagtgagacatcaacgtccttctgattggcgcccacaggaggctcaagcccctcctagcctaaactaatattgtggctgagcccctggaaatgaataatgataggaccctgaatatagctatgcacaagtatggagtacggaaaatatctcaaaggtcaaattcgtataggatcggccgtagagcagagagtatagacgaggaacaattcgaagattcataaggaaaagacaatattccaatccgagtacaataattaaaaaaggccaaaaggacaatgcgcgccatctatcaacaagattgccctacccactacaccgtacaggaagtttgaatcctgtcctatattggaaaatcatgacgggaggacctggggaggccatatgggatatcgaggggaaaagagaggttgacttcctctctcttaatctcgacatggtggggttttttttctcttcttctgtcactgtgtgcaaaaaagagagatttacagtgccttgccgccgacaaagttggcccaggtgcggacctcggagggaattccttcggcgcggggcagcttctggctcatgcactgagcaaagagctgggcagtctgtagaggatcagttagcaagttgaataattatggagtatcagctctttgaacataccttaggctccatgaatagaggcacgctgaaatcgacagcgttgcgacgcatgacatagtcttcatcaagctgggtcttgccacgggtcttggcaaggttgaagcagccacggatgtcgtacttctggaacacttcacggagagcacgcttgtccttcttggggaactcaatcagcttcacggagacgtcattctgggcggtggactcgatgtgagccttgacttcggggttgacggcatagaacttgtagccaagagggtgcaggtagtcgacaatcctggtcaggtagggctggttggtatcaccgccgagcaagataccctcgccgggctcgggcacgcggaagttcatggtggactggagggaagaccagtatgcctcgatcagatccttaccgaagcaagcaatttcaccggtggaggacatctcgacgcccaggaaggggtcggcaccagccagacgggtccaggagaactggggaaccttggtagcgaggtagtcacgcttcaccttcatgaggtcgacgggctcggggacatcacggccgacgagagccttggtggcgacgtcgatgaagttggtacctaggaccttgctgacgaaggggaaggagcgagaggcgcgcaggttgcactcaataaccttgagcgcgggctcgccaccctcctggtcggccttgatgatctgcatgttgaaggggccagtaatgttccaggccttagcgaccttttcggcgatctccttgacgcgggccatgatgggctcctcaagggtagcggggggcaggacgagggtggcatcaccggagtgaacaccagcgggctcgacgtgctcggaaacagcgtggacaagcagcttaccgttggaagcgacggcatccacatcaatctcctcggcaccctcgatgaacttggtgatgacaacggggtgatcaggggaaacggcagcggcgttcaagagcttctccttgagctcatcgacaccgtagatgacgttcatggcggcaccggacagaacgtaactgggacgaaccaagacggggtaacccacagtgtcggcgaagacctcagcatcagcgacagaggtcagttccttccaggcgggctggtcaacaccaatgctatcgaggatagaggagaacttgtgacggtcctcggccttgtcaatgtccagagggttggtacccataatagtagcaccaccgctctcttgcaggcggagggcaatgttctgaggaagctgaccaccgacagagacaacgacaccgctagacgcctcgagctcgtagatatccatgacacgctcgtagctgagctcctcgaagtacagcttatcagcggtatcgaagtcagtggagtaggtctcggggttgtagttaatcataacggtcttcttgcccatctcacggagggagagagtagcgttaacagcgcaccaatcgaactcaacggagctaccaatacggtacacaccgctgccaagaatgataattccgtggtcatcgaaggtaacatcgtgggaggaagcgttataggtagtgtagaggtagttggtatcggcggggaactcggcagcaagggtatcgatcttcttaacccaaggagtgatgccgaaggacttacggcgagcacggacatcatcctcggtagatccaaccaggagagagatctgcttatcggagaaaccgagcttcttagccttcatcaggatctcctgcttgaggccgaagaggctgccgatttccttgagttcattgttgcaatccacaatgttctggatcttgtacaagaaccacttgtcgatctttgtcagctcgtgaaccttgtcaacggagtagttctcgtggagcatagcctggccaacagccaaccagcggcgatcagtggggttgcggagagtctcgtcaaggtcatcaaacttatcaccctggagaccaaggtattgagggtcaacctgacggatggccttctgcagggactcctcccaggtacggccaatagccataacctcgccgaccgacttcatggcggagccaatgtcgcggttaacgtgctggaacttgctcaaatcccagcggggaatcttggtgacaacatagtccagactgggctcgaagttggcagtggtggtcttagtaacggcattagggagctcgggaagagtatgtcccaacccgatcttagccgcggtataagcaagcgggtaaccggtggccttggaagccagggcggaggaacgcgaaagacgagcgttaacctcaatgacacggtagtcgagtccatcgggctgcagagcgtattggacattgcactcgccaacgacacccaagtgacggacaatcttaatagcagcagtgcggagcatgtggtactcctcatcagacagagtctgactaggggcaacaacgatactgtcaccggtatgaattccgagagggtcgaagttctccatgttgcaaacggtaatacagttgttggcagcgtcacggacaacctcgtactcaacctccttccagcccttaagggacttctcgaccagaatctggggagacagagacagagagcgcgaggacaagtcacggagctcatcggggttgttggcgaagccagaacccaggccaccgagggcgtaagcagaccgaacaatgatggggtatccaacctgctcggcagccttgagagcgtcctcgacagtctcgacagcggtcgattcagcaatgggaatatcgatctcgttcaaggcctgggcgaagaggtcacggtcctcactagtctccagggtcttgatgggggtgccgagaaccttgacaccgtagcgttcaaaggtgcccatgcggttcatctgcacacccaggttcagggcagtctgaccaccgaaggtgaggagaataccatcggggcgctcgcgctcaatgacgtgggtaacatattcgggggtgacggggaggtagtagacttcgtccgcaagcttgtggtcggtctggatggtcgcaatgttggggttgatcaggatcgagtggacgccagcttccttgagagccttgagtgcttgagagcctattttatcgcacagtcaaaagattagttacagttctcatttagattgatttttagcgatcatttttcaagctctctgtattccccacagaaaagcttctcgtgcagacgcaacccccatggggactgacagggcgatgtgatcgaaaatttcatctccaagtgattgcaacttaccagaataatcgaattctccagcttgtccaatgctcaaaccaccactgccaatgacgaggaccttcttgacatcgacgaggttgctacctgccgacacagcaccgctagcgagataagactcagcagccgggggcctctcagcagccaggcggttcaatgtgctagagaaagaacggagctgctgagaccgagccgtggggatcttctgcaggcgtagtgtggaggccgttgaacggacggactgagatgagaatgcgcgcagagaaagtgctggtcgggtttcagcaatgcagcgctggcgcagcagagcggccgcctgcccacatcgagcagcgagagccattgcgcaccgaaggtaatgtttcaattgctgagggatgtgttgaggatgagtctacactttgctgggattcttttttttccgcctcgaagtcgctaattggctcgttccgtccaccgtatacggctccacttttgaagaccaacgagggaaagccgggggatattggggattatataccagcgtagatcgggaggatctaataatgaatcttgataatttagtatgaagaggttgggttttatatttgcttcattattcccctttttttgtttattataatctctttttttttcagttggtggcgatgagtcaaacctggatgtggagacgatctctcggctatctttcttatactaaattgtatgccccggtgtatactaattaaagccttggtaattgtctattgccatagctacctttcatgtatatagaagatgtagagtgtataggcaattggagcttccaagaacatcatatccctccagacaatcttggaaatgccgatgccggacctcaaccctatctcttatctctcaacatcgagctacgatctcccaccacaaccctaattgacagtagattggctggaaaaaggcaaccttacatcggctgtgactggcgacacgatggcgctggtgctaatgttgtccgttctgacattgccgtcattaaaaacgaaaacttagatgcctctatggccattgcatttgcatgggataagcataccgaagttgatagcggtggatcctaaagattcactggaaaatgcatagcaaatataggaaggaagctgtcatttactggtataccattgttcagactagtggatatggcgagaagtacgagcctatcgatggttgctagagaatgggagtatatattgacaatacttgggtgccaaagataggctttgtacatatacagctctaactaataaccgagcatcatggataaagacgcgagagacatgaatgctatgagagatctatagatgttgttatactcatctttctgggtaaacccccaaccttggcgactgcttagccaatttacctcggatattactcgatagctttgctgcaattggtatactaggctgtatgtgcatttctagcagagatattgtagtgatatgtcctactcgtggagaatagaaagaatatacaaatgagatactctatatatattcagctcttactccctcatataccatccaatcgtgatactaaaaacaacccacagaattcacaggcgaacagaacaagctctataatagcaactactaccaagtaaactatcgcgctagaatggaattgagtatgtatgtatgagttcgattccatgatcctcttactccgtcggacaaaccccaacaacctcgagagctacaccaaaagaccaacgcacatagctggattacgctgtaatgagccgatagagtatatggtatattgtacatttaaaaaagctattatactacatacatcactgtacaattattccgcaacccctactctcccattcagacgtgaccaaggaccactcggttgtttctcaatccgagacccaccacccctcgacatcccctttggagagcgagtttcggaggcccagaaatccgacccatctcggttctgccgaccctccagcatgacctcatcgaggtcctgattgagcgttttacatacttcagccaaggtttgtcgggcgtcctgcgcaacctcattacctaatgcgatcttttgctgaacaaactcctttccgttggcagctgcagcattagaggcaaatgcccatgcctcagcaagaccaacgacctcatccggggtctgctcggaggtctgtgtctggattcgcgagccaagagtaggagtatgcttaaagcgcggctggcgggcgagaatggggtattcggggagtaggtgggattcatcgctcagacgattgagggcgcgaagggtcgtggatttttcctttgacagtaacccggatagataggatctctggagagccagcgacttctgactcttatatagcgggaccagggtttcgtttgtgtataacagaacgtcgattgggttaggaggtggcatttctgctgtggaaagttcgattttgttggttgttcgtgacggaggcttctgggtcaaattgactggctgacaagctctggacgcggcgtcgaggagatctcgccgggcttgtagatatgcggcatattgctctgcaatctgtatcttgcgattctctagccctcgctgggcctcctcgatgtcctccggaggaagctcttggagcagactctcatctggatccccttgaccaaccagccgttcctccacccattgtactagctcatcccgggtcctttgtaatgcctgtgctttggtatctgcagtctcggcttggggatcatgctgtgccttggctttctcaaataattgcttctggcggtccaattgagccctcgcgcagacaactgctctctcgaggctatgcactagttcatccaagcccgtttcagtgtcattgcgcccgacctccgcatctgcctccggcaacagaatttgctcgctattattgccaacgtcctccacgctccccgaatcgcgggttctaatctcttcaagataattctgaaacacctgcagcttggtatggcggcgtcgatcgcgtaggagagcaaggtattcgcgaagttcggtgccgggctcttgcatatcagcatcgtcagaaggggctttcggggccgtccgctggcgccttaaagaggcgacatcctcagacgccaaggcgaactctttgcgggcggcaacattggctgccaatgccttgagataatcctttctcagcccaggaagatcggcagggatgcgtttgacattggtaacggcatcggtcgacgcgcacagggagaggtgggattgagcaagatcgcttgactgatcgttgaattcgataaatgagcgaagataagacgtcagtgcctggcggatatgaagggtttcctggcgcgatctgacgtaaggagcaagtggtttcaggatgtgtggaatgtgggtagcgtcaggagcgttggatcgggccatggtttcattaagtgagggtttgaagcgacaagcttggatatctggagagtcaaccttagaagccgagaccctgacaggtcttggaagacttcactgccacaatacacaatgcacaatccacagcgatctcgtgagatcgaagttgtttacctctttcacggcgggctgttggcaggcttatgtaacatgcagatcgtctcccgggccagtgccgcagtggagtttattgttttgcaagtccagcatctataatatgatgggtatgacgttcaggaaccggcaggagcttaaagacgccgatcaacaatgtattggcccttgggtcgattattgctcgatttattggacagctctaattgagacatccaatatgccgcaaagtgggcctgagcaccatgtctgttctgtacaatccccgttcatttggatgtttgccagtagattaacatatatattcatggaatgtgccatgagacacctatccgacagtcattgtagcgtatcgatctttttcgcaagacaaatagtgtgaatgttcatccaatatgtctggaatgccatgttatctagagctacggagtacaacgtaggtacatgtacatgtacgtacatacatccagtagatgcagattacgggcacggcccaatcaaagcgacaaaggataagacatctcacggcaagagagaagcccaacttttcggatttctctcttgcctttctcgattcctttccctgaaggagcaggcctttgaccccctccataactggtatgtttcaagaatatccctggaattgcatcaaggggtgttttgatctaattctggactaggatctgactgttcctgattattgtctcaaggctgaaacatttatacttcagtccttgcgacttacatgctgactgcgagtgcgggaaagcaaacttaacgtttagcaatatcatcagaacatacctgacagccatggctcctgacttgagcgctgcttccgactctactatggcacaacctcctgcagcaacgacggcacccgctatggcatcgcaggctccaacatcccgacaaccagtacacagttcccatacttctgtaacacttccgcccccaggaagcccaccgcttggaacgggggattatggcatcacaaggaccgctcagggtaagtcgccagtggcaggcgtcactttgatgagctccccgactaacagaacaagggccactgcgtcatcctcagccgctgacgccttcggatctccatctagtgcttgagaaagagcaagaagcgattgtaagtgggatcccagagcgccaaaagtatatctacccctcaactgctgacgcgtcaaaactctccgcaggtgaatcgattgactcgagagctatctattcttcgccagcagacagcatctgttgcatcgacgacatcctccacgtcaacttttaacgaggcagatggtgcgcgggcatcacccgccctcagcagttcaaccccatctcactccgcgcgacgaaaccgatccaattcgagtctcagttcacatacttcagcaagccagggccagcagtctgcaagtgtcactggaattgctccctcgcgggatattcaatatcgcccggaccattctcgaacggttcgcagtcgcgagccatccctcacctctcgccgaccctctatggggtcactatcctcattccctcacaacagcaacatatacccacaacggagctcggtctcacagacccagcaaggccattcacccggaaactccctgtcgcggtttgaggaggctgcacatcacaagttggaagtggaatacatgaagcgggagaatgagcagctgaggaggcgggtccgagatctggagcagactttgaagaggcaaaaggaagattcggccagtgaggcttctgccacaccatctgagagaatcattgaggcctgattttcaatttccactccaacccatatcattctttcgcattgcgcaacatttttatcttaggtttgcaggcaaacacattcatcgaaattataaaactgacatgtgaaaagcaatttcaggcagccccattgaagaccatgtagtccaatgaaacaaacactacggagtagaagaaaccagaacgaaattaactacgtgaggcggtgcaacagccccgccatacgtcaccacgtcaccttgtggcgcagtggcccccttagataaatagtcgcatcccaccagggaatgatgagatgtttagattccttcgcaagattcttcctttatcctctacctaacatcatggctaattccactgtccacgtttctggcatctcgtcaacaacctccgagaaggaggttcgcgacttcttcagcttctggtacattattacaatgattttttttatttgaccaagtgctaacataaaacagcggaaagattgtcaccctctccatcaccccagtctctggggaggccgatgctccgaagtccgccactgtgacgttcgaaaaggaggcgtaagctaccccgcacccagtttcagcccgcaatcagcccacatcaacacaaactaacgcaatttctaaaacagcgcagccaagactgccctcctcctagaccagacccaactgggcacttctgccgttcacgttgaagcaacccacaacatcgaagaaataggcggatcccatgtcaccgacgcggagaccgaggcccgggaagaggagcacatcgcgcaagaagacaagccccgatcgcgcatcgtcgcagagtacctggcgcacgggtacgtagtgagcgacaatgccatcatgaaggcgatcgcgctggacaagaagcacggtgtctcgcaccgcttcacgaccgcgctcaccaacttcgataagaagtacaatgccaccgagcgcgccaagggcatcgataacgactatcagatctccactaaggcagccaatggctggcgcggcctgagctcgtacttcgagaaggccctggagtccccctctggccagaagctgcgcgacttttatgttcagaccgataagcaggtgcgcgatatccacgccgaggcccgtcgtctggcggatttgaagcagggtaagactgaggctgctgccgctgcccctggccctgctgctgttgctgagcctgctactgagcccgctgctcagcccgctgctgttccttctcagcccgaggctgctgctgcgcctgttgagaagtcctaagggattattggaatgagatcttaaattaatgtggagatgaagatttgcgctgggcgtgtttcctttgtgtctattactttatcctttccattattacgatgtcatgtcatgccgtgtcaatagtttatttttctttctgataaccgattttagggctctttctatacacgtgagcctttgataactatggtctccaataagcaaagcaaattaacatgaagattgatttcaagtcagaggtttaatgtattgttttactaagtacattactcaaatgaagagattatttgagcttattcttcatgatgtcattatccgaaattcaaaaacaggaccttccaaatccacaagagataccccatctcaatggtgtttatcgttggcatatttcgccgcctcgatcttctctagccggggttcggggttgctcgtcatcacagtgtccctatattcctccgacgataacacgggttctggttgcttgccgacattggtcttgccggagccggggatatcctgctgctgggcgccggattggcgctccggagaaggggattgacggccgggtaagggagcagacattattgtggatattgtagaagttttttaatgtgctgaagagagggataagtgtgagtttcttaactgaagaagggaaatggaactcatgagatatggcgatcttgacagtactgaccttcaagtgatgtaggcttgtaatggatgaagatgttgagtatgtgtgtttgaacagtagagtctaaggaatagtgcttcttttattttatcctggaaaccaactgacgttaccaactaaaccggtcattgattgggggtcatcatgatgacgttgagtagcacttggaacaaggcctacaacatacaactaccacaagacgatcctacaacttactaacggtatatacttaagtatccttattgtagttatagtacggagtagtctgtgccgccatagatccttactatgggctacttctgacttctttgctctagaaccaaaaccatcacttctttaagcgttgtttcatctcagtaaaacttgtttgtgccatgaatatattcacgttgacttcaagagcaagccgtgcgcgacgacgtcggaatccgacaatgcctcgaggatacaggtcccaccgacaatatggataatgctcctgagccatgacgtcacttgtcacgatctttgttttgacctcacctttttccttccatactcctacacgagtaatcttagaatattcttataacaatctggattcagttccgagtccactaggtggctggtttcgacggcactacaggttccagagctggaatccatcattcgtagcatggctgatgtactatatcatgaggaaacaagggtgtcttcaggggaatctgtgcatcgaagaggattagaaaggggaagagggggaataccctcgagcagaatgtccacaggtaggacttttaagagtacatcagcgagagcatcacatgaaaaagacgtgaggaaagaaaacacggagatacagagcagacgggacatgatctaaagaagcgggaaagacatgaaatgggcatatggtctcgtgaggaaaatgtggaaggaggaaagaaaaatcgtccgaggcattggaaattcgaatccttttttgtttttctcaatccatctcggttatagtctcttagttgccgttggcctgcatgcccgctgcggcagcggcttctgcgttggcggcggcgaccatggccttggcatcggcttcgtggaagacgccttgtatgacctgctgctcttcgtgaccaagaaccttggtcagactctcgtagagctggggctgttcttgttggaggcctgaaatcgaggttagctggtgataggatactctcttatatgtcacttactcaacaggacatgcttgaacatgccatatggctccaatttgtccagaggggtctctagaaggctttcctcgtccatgtcatcatcgtcatcatcggtgtaggagccgaatttttgagcttcctggttgaggaagtcgagataagcagcactctcgtcgtgaacatcaccctcttcaagagctgcttcaacctcgttttcgtcccactcaacatctccatcccagtcattgtcttcgtcgtcttcatcatcctcgtcatcgagggtgaagtcggactccttggtagcatcctcgcgttctggataaattcttagccttggggaaacacgacgggatacttggagaaacatacgcttgagagcagcaggcagggtctggaagagtcttgtcacaccctgcaacagtcttggccatccctgctggacactgaccggaacatcggcagccttcaaagtaagcagtgagctgattgcggcaattgacagctttttgtcgtgtacacgtctgaagttgtcaatgttagcgaaccaagtgctgaagaatttgtttgtccagcccttagcctccataacctgcagactaagagctgggttgtagtaaatggcgttaatgaccatctccatcaagtggatgcggtacgacttggtgcttgcctcgccagcatcgataacccgcatagccatctcaatgaacatggggatgtactggtcaatgtgaccccgaaggttgagcatcagggtctcagcaagcttgcatccgcagatgcggtcaacgccaccaacctgttcgtcagaaaagatgtcctgcaccataccaaccatagcgtccaagtaagctgggttctgaactagcatatcggagccataagcgacatagttgtcaagggcgggaagcatgtctgtacgcagaaaagttaataaaacatcaaaaccgcgtgaatttatgtgaacttcaccttcgagatacagctcagcaccagccttgaaggtcttgtggatcagctcgaaagcttgccacatagatggggaaatggtcttggatgcgaatgtgcagctgtcaatgatctcgaaaatttcgttatagagatctaaaatagccagttagagccgcgcatacgcttgatatattgacaaacttaccataaagcttgttctctagggtgatgctgatgacgggcatcaagatagtctcgaggtgcaaaagcacgtcaggggtgctctcgagtgtgagaatgagggtgccgatggtctgtaacacacccagagcggttatgctcttgtcatccaagaaatcgccgtagccatcttcgtcaccacccttggaggcattgcgttccaagagctcaccaacaatacgcatgtatgtatcgcggagctgctcgctcaacgctacagcgaagggagtaagctcggcagagaatacctcaacaaagtcctccatgacgttggctagagcatccacgtcgacctcattggccaacttgagaagctgctgcataatctggggaatgttctgctgcatcgaggtacggatgacatcgtgacggataaggggctgcagagcaagggcagcctcaactcgcacgggaagttcggaatcggtcatggactccaggatgtttcgatagataaccatgaggttgttagggtccttgaagtcgagctgctcgaacttctccagggtgtcgcaagcacgagcacggaggaagccatggggactgcggaattcggggaaaacatgacggacgaagaagtattcgacctggtcagcaatcgggctcttcttgcccaggataacggaagcaagcgagccaatcattctcaaagcgccctccttctccctgggctgcttctgatcatccggcgcagactcatatttgctaacaacactgtttacgaatgtaagaattgagaaggtctgcttcttgcggttcttggtaagggaaaccaagaagtttgtggcggcaacatcaggagcggaaacctcctcatagaagttcaacttgcggtggagatactcagatgggtcatcttcgaaaagctcaatatcctcgtcggattggcacaagatagggaaaacgaagtgggcaatcaggttatccatgtgcggcttcaagtggtcccacatggcctttggcttgacacactcctccataaagaccaaagtatacgaaagtgcggagttgctgagccattgtgtcttggacacccacttgtcaatctccgtcaggtatcccttgagaatttcgggggcgaaagtgctgataaaggtcttggcatacggtgtgtagtcgggggtagaggatttcgtgatcgtggtagggttgccatatctgatgaataggcggttcaagttggcatatgaccacttcttgcacttccaccagtggttcatctccctctcctccttcgagtctgccattgagctggcagggggtgtcttcgagacaatgcgcaagaatagtgtacaccagtccacagtcgcttggtgggtctgtaggcatggagaaagctcgaactaaaatcgcaatcagtcagtataaataacctagccccgcgcagactagaatcagggtaactgacataaattgcgtgcttgaaagccttcactacaatacgaagcatctccgcagcctccagactttcctcatcaacaagcttcgatccgatgctgaggagctgtgggaatgacagctccacgatcttatcaaactcctctctcttctcgccagccttaaacctgtaaacccggcagactgccaaaagacactgcagacccgcatagaccgtactcgcatcattggtgctgagaagctgcagagtaagatccaaaaaacccggccactgctcggggaagtcgttttggagaatcttctgcaggaggggaaccagttgattgcggacgttgggaggagtcgaagccagagcagggataagtctctccctgaaactaggcttctcgatttcgggaatcggcgtacgctgcgggctatcttcgacgggggcccacccacgggtaatacggttcttcaggtaaacaccagctataagagtgagcgggtcagcaagggacagcatttcctttgccaactaatatagacaccaaacttaccagagagctggactgcattgttctgctcgccctgcaagatatccaagagtccattgataaatccgggttgtgtctcggcctagatatatcaaccacgtgtgagtctgacgtccggtgccccgccagtcgatccagcacgtacatatttcaaatcaagctccgcttgccggcgtatatccgcattcgcgtctagagtagactgaacacgatctcggagggctgtgacatccatcgcgcaacaatcccccaacaccagaaagtcaaaaaatctccaaatacactgagaaccccggggggagacgcggaccggcgctaatggaagacgggcgaggaaaaaaagtcaagaattgtaaggacgtgagtgtccttgaagagatcggtctggatcttgaagacaaggtgagagaagatgttgttcttcaagaggagggggattttttttcgattttcccgactctcgggaggcggtcgccccgcagctaatcagaggccgcacacacggattttgtaagaactatgaactacctagatgtgggctattgtgagcttggataaacactgagggttgatttattgctctctctaaaacattacaggggtttattattgatttatatagagtttgatggtttcgtattcattccttcatcttgattacatacattgcggaatccatcagtggaggagaggttcatgactacccaatagggccgcaggcatataccccctaaggattgggtatcttcacatgtaaagagaggccgcgaagatgacatcgcgcttgatcaactcctgagcttgctgcatcttagtgtaaagtgtcgggtctccgaccagtttggccgcattcttcacttcgcgacaagtctcgtccagtcgggtgatcacccgaacaatagtaccctccattacgtccgtgaggtcagtgatgcgattgaaagacattcccttggcccactcataaacaacttcagcgagaccgaagcgtggcttactagcgaagtcgttggaatcttcactagattgaatgacctggtgcagaatctggaaatcattcactttctcggcgatacgaatgatctccttctggcccttctccagacgtggagtgagggtgggagtgctgtctgtcttttcctggaacacaaatgcagagaggagtgcaacaatctcctccggctcgtattcagcaagaacgttctcgagaaccaattcggttaagaccaactcgtcggcggagtgaatttcgcatgccaccttgcccttcagttgtacacgagattgttcgtcaacaaagccgagctccctcagtacgtgaatgcgctgctcataatccggaagtagttggaggttttggtcggacatcagctgcttcaactccgagatgttttctttaacttgccactcgtcgtgttgcatttcgaactatatggcattagtatggggttcagatcaataggaatgagatactcacatggtttacgaaatcaggacattgtagacagtggcatgactgggcaatctctgcctgaacttgtcgtttgtcgaggatatcgcggatttccatttctttgatacgttgccagtcgatttcgtcccaggccgtatcgatccaagagttggtgaactggcatagttctgtttctgcccacttcatagactctatttctgaattagtattttcgtaaccgtatgttcaagaagacagtatgaacttacccttcttaatattcagataccacattggttttgtgattttaacctgggtgtttgtcacgcactcgagatcggataacggaatcttgcacactcgaaggctcatgtcatctacacgattggggagtggttggaagtagggtctgaataaaggtaagaatggaagaatgtcagtggggtgccgcttgctactcaaggttccaatctcaagtacttgaatacagggcacggccccaatgactccgggagaaactccgtcgcgcgtaataacaccagcagtacggagtccatcctgtgtttcacgttagctttaaaccaaatatgtattatatcgcaacagaacacgagcactcaccttgcggtacacaaccaacctcttcattgtgaaaagacgtttgccgacaggcgatgatagcagttcggtgtggaactcagctgtgagctttcgatactccatggcggcgttatggcaggtcaatagatccaaatcacagatctcacatggtgcccgtttgattttcgcaagactggcctcagatacctggacttgcttctcgtgttctggtaagagggcttgtgttgcgttttcactgaaactccgcttgatcatttcctcgatcttcagggcttccacacgcaacagatttagtatcatgttgtatgtgagtcggaattgagatctgagctttgtcggatctccaagaatcatctgtttcaacgaggcagcagatggggcctcgtcttttccactgtttgtcacgatgacatatcccaccgtgtcaagacctctacgaccagcacgtccagccatttgcgtatattcgccgggcaggagatcacggaagcttttgccgtcgtgcttgcggaacccggagaataccacagttcgggtgggaagattcaagcccatcgcgaaggtctctgtggcgaacagaaccttgaccagagacctagcgaagagaatctcaacaacttccttcatgatgggcaggagaccaccatggtgtacagcaatgcctctgcttaatagctcgcgcaggcgaaggatttgcggcagcgtacggtcctcgggctttaatcgagtgagtgacttttcaatgaacatgtgtgtcaaactcttctcgttggcattgctgaagtcttggtttgaaagtgaatctgcgttctcctcgcatcgtttcttagagaaaacgaagacacatcccggcagcaagtcttctttgcgaagatgcgaaacaagatgcacccaagtgtttttgtcctgggccgcacttgtacgaccaccaccacggcctgtacgagcgatgttacccgtgcctcggttggagtactgtccaccgctctgtcctcgacctcgttgcgggcctccacgctgtgggccgccgcggccgcctctgttattcgctggctgaccgcggcctcggccctggggagctggtgctctagcttgcgccgactgcgcctgagcttcagcctccttcttagctttggccttatctttgccggacaggatatcatccgcttccttccagccactctcaaggaatcttttgttggagtcgacgatcttgtgcttgctcttcccggcccagagatagtgctccagcgggacaggtcgcttatgggttgaaattacataaatgtccttcttctttgtacggcccacccaggatgcaaactcccgagtattgggaacagtggcagagagaagaatcaacgtgacatgctcgggaagcataatgatgacttcttcccataccactcctcgttcgaggtcgttcacataatgcacctcatcaaaaatgacgaattcaacgtcccggatgagatcagcacctcggtacagcatacttcgcaagatctcagtggtcataatgagacagctcgcttccgggttgatttgaacatcaccagtcagaatgccgacatcgtcgaattcggttctgaaatcacggtatttctggttgctcagcgctttgatgggagaagtatagattgctttggtcatatgcttagcagccaaggcgattgcatattcagccacaactgtcttgcctgccgaggtatgggctgcaacaaacaccgaatcgccattttcgaggtggtaaacagcctccttttggaaagtgtcgagctcgaatggccactctctggccatatctggaaccaactcattgaagttgggaatatccttgttgacatcgacaacgtgggcccattctctacctttttgcttgacacctgcaagcaactggctacgcggctccaacgccgggaactcaactggtagcaaagcgtcaatatcttcttcttcttcatcgtcgctgatatcatcaagctcgacctctgctcctaattcgacatccgcagattcctcgggttgatccaccttcaggtcactttcctcttggagaagggcggtttcgacttcttgggcaccttcggtggcggctttagattttgcttcatcgaaatcgataccgttatcgaagccagggggtgttgtcagaagacctccctcggtgccaaagttgatgatgcgatcgagtccagattgtttccccttggtcgattgttctgtgacctgagcatcggcctccattgctgccaaggcctcgatagcgtccaagcctccgggtgcgaacggaaagaaacctgcggcacctctgacaaagtcggcacgaccagcaggtcggcggagaagcgaggtggaattcttggccgttgcgcttgcagcaggaaccgtgacttcttgatatccagtgacgcgtccttccagtccctctcgtgtaaatcgcgttactgtccgtgtttgtgttggcgcgagttcgaaaaggtctgcatagtctgtcgaaacgtcccatcgtctgccaaagccgttaaaagctgccccgcgaatgaaaccaagatacttacttacttttggagagagttcaaccatttagtgctgaattggtccgatggggtcagaaactcattttcgagctctgttagcaactcttgcgcactctgaggggcctgcttccgagcttggaagttctcgatcttgccatcctcttcgtctgcgagacgagcatcgaaggtcgcggggtcgaagtgtctgccttctatgtctagctccttcattgtggaatcgagcgagtcggccatggtgtaggcaatgtatcggagagataagtaaaattatgtcgatgtttgactcggcagtagccgaaccccacaccgatatctgtatggatttcaagttctggcgcaaacacgggagtaattgtattccgacgtaaaaagaacaaatttaacgaatgaaattgattatgcgggtgagtgcgatagagtatttcgaagtgctttcaggcaacattatgtagcaataggctacttggggtaaacctcgctgagagaaactcaaggcggtgtagtccggcagtatccatgacgtcgatgcccaggtgtggggttatcgcatttagggctatgtgtactagtaatacttggccgcccatgcgggctctgcctttaataatccgatctatttagccgaagacgatatcaagcgcgttacatgtaagatcatacgatgtagcaatacctatactcgtgtcaggtttcgttttgggccgcaggccgctgtaacttcattgatcaagacaaccagcagccttcagccaggcaaagaaaagactgcagggtgaagacaaaaagaaatttacttatcatactgattccattgttatagctaactatttagtcctaaatccacctctcttatttttcgactcgttctgaggaagcacgatttggaagaatttcttgacatttttaacagcatacagctatattttcgagaatggcgatcaacaatcattttgatgagcgagttctgggttggcatccggatatagccggataaaatggccttttcttcaatttggacaagattgtattggcagaaaatatcaatatatatttaactttttgtacttcaatcagtcatacgaagaattgtgaatgaaagatgcaacaaataaaagggatagggatgaaatgatgtacgcccctaagcgccagaagggtatgtagtgtgagaacgattccatatgagaaaaggattagcacaacaagaatgagtcctgacaaggaatggcaatgaatcccttttttaaagtgaagactgtagatcatcctggtttagcagcaggtccgtcgttcgaagagattccggacctttgtgaaatctgcatgatcatgatcagaagaaaaaaacaagaaagaaaatcacagaaaagtaaatgagactcgatgatgttagataaataattcccagtaacgccaggcatggaaatttaacggcaagagaatttaggaaatgttttccgatcgtgaatgttcagtgagaattcgaaaattccctccagtgttgcgatgtacctgaaaaaaaaaattagtttaagcccgcaaggttgctgcattgcacactcacaatgtgcgtccatcagcgccccagccaactccagcagtagaatctggctcctcggcgccgcacccatgcattgaatttcgatcagggaggtcattgataatgtttctgatccagcggggagaatgtgtctgttcaaatccgagaagctgttggcgatgccgttgttccctctcaaaggagcggttgtgtacctcattagcaatctggcgctggcgccgaagtcgctcagcagcgacattggcacgaatctcatatgtggtgagacgtggattatcatatcttctttctgctccggtttgtggtcgttcgatgcgccggggaatggagcttgatcgctggggtcgatggttcaaaccattcgtatctagacttggattagaagatccagtcgcttcagctggaatgctagtttcgttgttggtcgtttcaggattggcagtaccccgatagatcatttctgatctgaggggtgtaagctctgaatgcgaggtggaataactcagggtgatgtctgattggcgatcatggtgagaggacgatgcttccgaaggtcgacgacttccttgagataccaccaccgagctctggcgtcttggattggatacagtgcggcccaaatggctatctcgggagacatcagaagaatcatagcgatgcaagggcgaagtaggacgatgggtgcgagtggcaccatccgtggaaccatgattttgcggccgagccactagttgaggtggaaggcctgccctagccgggcgctctaatcgttcagtaagtccttcttccagccgtgatgtccagcgtgccgtgttcaaaaactccataatcagcctttctctctcgctaagatcttgaatcaaagactcccgcagagacgaacgctccgtttgctctccattccgttcaatcgaaaaatcttcgttttcgagtctcactcgtggtggagtctccagaatatcgtctcctagcgggtgtcgttcgaggttctctgttgaaaagtccgtgtacacttcctgcaattgtggatcattagaatctaaatggaggatttgtctgcgcataaaatgttggcgaacgtcggccacaccagctctaccgtgaccctccagccatacaagaaggtcccatggttcgggcgaaaaggccatgcaacgaacggcaccgccctcggtgcatgatcttgatgccgggaattgacaaagaatagcagagtcgtcttcagagtcgccaaacttgtatatggactcaacgtcgataatagtgatgattccagattgagatccgatggcacacaagctgcttgacggggagaaagcgacggtgaagcagcacgcatcatccgcccgcaggccaatgttcatctccaggcgattgataagttcccattcccacccggtgagcttctttccagattcagttgtcccagaagattccaaatcacgagtgatttcataaaagtaggcgtgattctcatcccctactgccgtgagcagtttagagtccggggagattgtcgcatagttcatacaagtcggatgatgaaggaccgtcaagactttcgcgcgagtcaacgaatacaccgtgactgttcgatcattattgctattcatctgagtcagcatgatcaacgaaaccacaacccaactttccgaccagcgcccacctcagaaccacgatatcttcatccgccaagtcctcgctaccaccatagaaacgatggatggtcactgaattgacaatgctcccaccgaacccatggagctctacttcgggggataatcggctgcttcgatagcgggttgaagcagattcggcattgaaatcacccggagctatgcttgacggtggatcgagatcgagtgggagcgcactatctacatcggcatggaagggtgtatctccatggacctgcattccgcgatcaccgatgcgaatgaaagcacattcgccattttccgggccccccactactatccaaccatacccggcaaccagacagcgcggctcaaatgggagtaccgctacactctcgcgcttttgtgccgatatgtgtattgaatagacgattctctcgacgacgacataaatgcgatcgggatcagcagtactaatgtagttgcgaagctgtgtgtgactaaaacagagctctcttgggttaggctgcgcacggaagataagcgggttgatcaacgaacaagttggggatcttgaacgggaagaagcgtcgcttggtcggaaggatgagagcctcggttgggcgatgtctaagacagccacgttagaattattccggtagtgagatgcaccaggccttacagcagcgtagaatccgaggtcatggtggatagagctaagccagagataacattgtttgagcggggaagttaggaagacaagagaaacggggcccccgttggagtatgtcaacttgacagttatttaggcagcggacaccttgttttgtttcttcttagataaatttccttttggatagtctgtgctctgcagtgttcagtgtcaaactgcccggtgctttcattggatgacgtaatacttgggactgggacaaaaagccggggaaccgcaaattccaacgaatgcggtttgattgtcaccccgaaaccggccttgatcattcatgatgatgcattacactgtttatatctttttgcttactttaaagatcctatatactccatggtgcatagtgcataacatatacgtgttgcccccagtcccaacgatctgggccaggcattgtttccccccaaagtacggagtacatgaattgtcattgaccatctagatctaggcggactttcagctccattttcaatcttgtctcaggttcagccgaatcaacgaagcggagtttgccgactaggtcacacgacaccttgagagtatgactggttcagctactggagatacacgattttcgcaagtgttatgaggaagaaatgcttattgcgaccattctgtatggtatttgcaccaggccgtatacaatatggacctcgggagttcctcggagctcttcaatatttgccacacggcggaatgatgccattgaactgccactcctccgtactactacttgagatatcaggcagagtatgccgcatacatgattactatgtgctccgtaggctctactcgcaatacatccctatatccctaccctaatatccctacatcctatggcaatagccctatatccctatcctaatccaatacacctatgtcattgtatacccgcatatacggcaccaggcggtgagctcggttacctaggaggccatcgacaacaaggccatctctgattggtccgatcccgtgattctaccaagttcgacgggccgaagctctccgtgcaatttctatttccttcttcctttctcttcgattccatctctctatcttcatctcttcaatcgcatcttctgtccttttaatacttcacgattgaatcgctggagtttctctttttctctttttattaattaatttatcatcacaatgcttcctcgcacaattactcgcgcagtaagcttgcccttcttcccgaacaatcagcgcgtcacaggttactgactcaactctctctcagctcccgcgcgctgctttcgctcgcactcctgcctccagactcccagcctcattccggagatggaactccacagagggtggtgaggagaaggtaaagggccaggtcattggtattgatcttggtaagtactggcgcgagatgaaaatcatcaatgacgacagtattttaactttttattttcttaattataggtaccaccaactctgccgtggctgttatggagggcaagtcccctaagatcatcgagaacgctgaaggtatgtgagaagaaatttcaactccggacaagtggtcagagcttcggaactcagacttgcatccaccgtatgatgggcttaaatggaattagcaactaactcaactcttcaacaggtgctcgcactactccttccgttgttggttttgcacaggatggtgagcgcttggtcggtattgccgccaaacgtcaggccgttgtcaaccccgagaacactctgttcgctaccaagcgtctgattggtcgcaagtacaccgatgtcgaggttcagcgtgacattaaggaggttccctacaagatcgtccagcacagcaacggtgacgcctgggttgaggcccgtggccagaagtactctccttcccaggttggtggcttcgtccttaacaagatgaaggagaccgccgaggcctacctcggcaagcccgttaagaacgccgttgttactgttcccgcatacttcaacgactctcagcgtcaggctaccaaggatgctggtcagattgccggcctgaacgttctccgtgtcgtgaacgagcctaccgctgctgcccttgcctacggtatggagaaggaggctgaccgtgttgtcgctgtctacgatcttggtggtggtaccttcgatatctccgtcctcgagatccagaagggtgtcttcgaggtcaagtctaccaacggtgacactcaccttggtggtgaggatttcgatatccacctcgtccgcaacatcgttgccgagttcaagaaggagaccggtgtcgaccttaccggcgaccgtatggccatccagcgtatccgtgaggccgccgagaaggccaagatcgagctgtcctcttccctccagactgagatcaggtaagcatttccaattttggaacatcttagtaggccagtaactaattagtaatttttcgcacagtcttcctttcatcactgccggcgccagcggtgctttgcacattacccagaagctgacccgttctcagctcgaggctctggtcgagccccttatcagccgtactactgagcccgtccgcaaggccctgaaggatgccaacctccagtctggtgacattcaggatatcatcctggtcggtggtatgacccgtatgcccaaggtcactgagtccgtcaaggccctattcggccgtgagccctccaagtccgtcaaccctgatgaggctgttgccatcggtgccgctatccagggtgccgtcctggctggtgaggtcactgacgtcctcctgctcgatgtcactcctctttccctcggtatcgagaccctcggcggtgtcttcacccgtctgatcaaccgcaacactaccatccccaccaagaagtctcagaccttctccaccgctgctgacatgcagaccgctgtcgagatcaaggtctaccagggtgagcgtgagctcgtccgtgacaacaagatgctgggcaacttccagcttgttggcattcctcccgctcaccgcggtgtcccccagatcgaggtcaccttcgacattgacgctgactccattgtccacgtcaacgccaaggataagtctaccaacaaggaccagtctatcaccattgcctccggctccggtctttctgacgccgagattcagtccatggttgaggagtccgagaagtacgccgagactgataaggagcgcaaggccgccattgaggccgccaaccgcgccgacagcgtcctgaacgataccgagaaggccctcaaggacttcgaggaccgtcttgacaaggctgaggccgagaccatcaaggagaagatcgccactctccgtgagttcgttgtcaagagccagtctggcgagagcaccaccactgctgaggagctcaaggagaaggtcgacgacctccagactgccagcttgaccctgttcgacaagatgcacaaggccaacaacgagcagcagcagcagcagcagggtggtgagcagcagggtgagaccaagcagtaaatgcttttctttctatgactgccacacctgaaccgcacatggttactgtatttttctatcttcccttatgtttttcctttttttcagagactccctgatttttgcatctccttcctcgcatctacctgtacacatactttcaaggccctttttacccctttgcgttttctggtgtatcggtgttcaatctaccacacccatgtatgatcctatattcttttctcttctgcccttgtgtcactgttcaggttatcgcctggaggtggtcatctcggggttgtctacaattgtatctaatgacattacggcagtggggccacaaaaaaggatgtggtaggctttggttttcatgggcatgtgacaatagaaatcggacaattctcctctcgcttcacaatcattttccaactgtaggtctagttgcatcaatgctatcaacgtgcagtgcagatgtagttctcacctatctgcgagtgacacgcgccgttgggacatttgctcgcggatgcagagttgcttccggcttattattagtttccaactcaacatacatatgcatgtaggtacttgaccacaggcaaacaacactgctagaatctctatgctgcactctgcatgtacgccgatttatctggttaaagatgacataatgagcgttatattaagacaacactacggagtaactatggagtacgatatctttggatatctttcctccatgtttcagctcccacaaaaacgatgaagagtatttcccacggaataatggatatacatgctcggaaatataaccaaagcagcaaccaataaaagcaacggccaagctgaccatgattacgatgtacatagcagtgactattattgtccgaaatacactttaacgcatttaataagaagcagactactagattcccaggatcatgtccaccgcaaagtcaaatatctggagcgatgacaacgatgataggccagaagctcgcagctggcgcacgggtttcgacccttaggcccgccagagcgcacacgttgaaccagccaccagaaactgtatcgcgttccatcgcaccaatctattaatctaattctggcatctgggcctccactttgggaccatcggactgggtttcaagggcagcccatttggttagaccaatcgtctgtacggggcatagtgtctcatccttgcattatccacagagaatcaaggctgatttattcactagtgaatgatgggagctagatcgagaggggcgaggattgtaaggatgtgacaggggctataatcgctaggtacgatataacatacggagtacatacatccgtaagtagaagtaggtttcggcaagcttctattgtgtattgtgtcccttgtcctcccttaactttaacaatgcatgcaagttctgacaattgcccttgacatccatcaacaaaggagaagcaatacgagaaaagcaacgtcctgccactagaccaatctggactcgagtgacagaacgaagcaatcgtgcagtgcaggcttccctgcagcaaatcatcgttgtacacacttgttgggctgccacagtgggtctttcccaatgactctgtaaataattatttctcaatttctcattctaatccgaacaattatatgagaggcttggtggggattgaaatgcaggacatttgaaatagacaggggggtacttctgtcctcgattcggaagtatacgaacaatagctgcccctaccgatactatatcgaatattggattgtatgtactccgtctatactccgtagcaccgatcaccatcgcaaagtgtaagatgactcttaaattttaaattaaatctcggcgcaactagaaaaatttcaaacgcccacataacttccccctcggcgattcgtcgatcacttcttgtgtgtgagaccatctgcgttagcgtgcccctagtacgtatgattatttccatttccccactcggttgacaagctgtgttttttttttccttgttctacggttctcgtttcccttttttgtttcattttattccgtaggactccatacaagctcagccctggtgtttgttggagacccataactataatcaggaaatagaagataggactagatatgtggattttccttgatttccaatcctatttgttaaatattctgtgatatttatgttatatcgtaggatgttctaattacggagtccagaaaagatacataagaaattaaatagattgccagacaataatatgtggaggaccccgaatggagatgtagacgtgaggatatcccatatccaactccgtaattcttcccgcttctatggctaccatggaacttctcaggaacaagttctccccctgtgttacataatgatcgccaggatgagaacagggtagatctgttgcttctgattggactgttcattccggaattaaggacggagtaggaaaaattcaatcgtggaggctctgattcgaggctttgactatcgagtttagcttttagggtctacgatacataactcgcatactataataaggtaggttacgcctattttctccggggaaagctaagaaaaacagaaaacataaaacctgaatttctaaattgaccggattcccaatttccaattcccatttcccaattccctagattattagaccaatgacgctcagcagtaatttttagactggtcatgtttacgctccccctgaaggagatgtcaagtgacttccaattttggtcgatgtcgatcattggtccggtcgatgatagtctccattctgatccaagggctttggtgattgtgatttgattacatgctagcgttgtgccaattccatggatgggatttggtgggaaatgaatctttgctttgtttgatactatacagtatggtatacatactctatccctatcctatttactatattcactatactcctattcaacactatgatctatccgatcaatcacaatcctcccctgagtcgatcccttacgccgttacgggcattttcaagataacgggggtgcagaagggtcgagtggagtcgcttcttactttctattattatattatttgacatatattatattattgttttgttttgttttattcccatttttcccatgtccactttatcggtatagttagctcaaggtctgaatgtcaatcctttccaaaccgtcgacccatagatcggagatgggtcttccctttcgatccttgtctcatcctgttttcttttctttttcgacttctcttcctttgaacttcttcatactctcttcagcttttggtgcaggagggttccagactgtatcacctctcgcacctccccatccataaccatgaccactgcaccgccggtgcatcactctggccccgatagtggcatccccggccatctcgtcaaccatctccctcgctaccatcccattgccatgaatccaaatccacctccacaccagatgccgccgccggagcagatggtgcagagccaccatttccgccatttcgcgccgcccatgcatgaacatcatccgcaaggaatcccaccaatacacagtccagcttccttggaacatatcgaagctcgactccggcatctagagcacgaggagatggtccggaatgcaacccggagtcgcgtcttggcaatgcgaaagcatgaagatgaggaatttcggtcaatgacggagcgagccgaggcagaggaagaggtaagcgattgggatatccatctggtgaattgagattctaaagcttcacaggaccttcgaagacaacggaaaaagttaaagagagagtccatgggactgggcctcaatgccgcgggcgactcgccgcctcttcggcctacaccacctcgccgattatcagagacgagtgcagcaaccacattggcatttttcaagcagcaaacaccccccgagccccgtcaagaaccccttccatcttcatctcaggcgccgcctccctcaatgccgccaccccatatgcatgctcaacctcatcatcaagctcccccgcctcccccaccatctcagcatcaacacccaatgcttccccacgactcaatacaaatacacagcgctggctccatccgccgcaagcaaaaatacactatcaaaaacgtagaggcatggggcgaacgccacggccgaccagccgcccatgacccatccgggcgagcgttgtggaagagaccgtccgacggaagcttagtatatctcacctgcccgatccacggctgcgggaaatcagacttcgtcaccctccatggcttcatgtgccatctcaccaagaaacacaaggaccgcactctgggcagccagtcccgcgccctcgaagtctgcggtgtagtctacgacccgaacgctcccctcccgccagtcatgaacaaccaccgggcctcaacagaaggcagtcccctgggctccaatcccctggaccccgacggcgaccagcactacgaggacatggactcggagtctgaaggcgagctcgagcgcgagggctcctaccgagtcaagaccgaagtcctagatcggttcatgcccgacgcagagggcacccccattgaacccgctgcggcaacaccccccaagcacgcagccaacggatcaaccaagcagtccatctcgtccatcatcgaccgcacccccgaaacagaatccagagaggcgctggcgactcttccgccgtcggaatctggtatccagggtccgtcccctacatccaccgagtcgtctgtgccctcgaagcgcaagtacgaattctcgccgccggcggaaaaagaaaatgcggagccttagatggtgtgcggaataatgtttatcttcaatgtcgatttccgccggcaatacatacatacacctacataatttcttgagcgtctacgaatatcagcgctgtcgatatgataatctattgcatcatgctcttgtatttcttgtgtcggttagatgtgcttcgggcatgtcttttctcgataccctttcgttatatatgggttggttttggcgtcttctattttatttgaacatactggctcgaagctgtgcgcattaccatataatgcttcatagctagctgcatactgcatactgagcatttcggagtttatccatgcgtcttttgtctcgctgtgaatcacagccgctgggggtacaaaatcaggagattatgagagccttggctaccggaaagtgctgttcgggtcttctgctgctgtaaataaaactgtctcgagatatcggtaactccttgctatgtatatagtacacactcataagcacaaacaaatcaagcacctgttgataacatcgcaagcttcattggtggtctgaagtatgtttagtagttcgtggatctcatctatagaggtctgaaatccagactcatattcatgttagtccgagtactcttcaaagtccctcaagttgatcccgaatgttgctctaaacaatatagctagtgatgaccatctgtaggttgtttctgattttagtatgggaaagcctcagcctaggacagctagctatatacagtactcccaagataggtatgaacaaagccacctatatgtacttctaatatatctacatctatatgctatctatccctcaccaataacaaatgcaccaaatatccagacccactcctcaatccctccccaagcacatcatccctcaacctccaaacccgaaactcccgcatcgcctccctaagccaagtctcaaacacatcgggcgaccgctgctgctgcgcaataatacaaaccgtcggtctgcggcgctcccgcagttccccagactcagccacatacgccggccggagtcgacatagctccgcgcaggtgcgcacgaacggcgccacgagtgcttcgttgtagatgcagtcacaggaaagcaggaggtcgaagcctttatcttcgtctccttctccttcttcctcgccgtgagtctcgtcgagatccatacattctttcagagaggcggcctggtcagtctcccagtccagggttgtgaaggagatattagtgacaggcttggcggtcgttggttttgattttgatttggatgccttgctcttgctttttgctttgctgttgttgttgctagagacagggacggatgcattagcgtcgagattcgtgcggaacaacttgcgcacgtattcttggtctgtggcgatgtagtggcgtacggagggggctaggacgagcgcgactagtgcggagatgccggtgccgagttcggctactgttgaggtctggctgaggagggcggttgtccagagcgggtttgaggggttggttatccattctgcgaataaaggggtgattttccataggactgggtttgtagggttagtattggtttaatttcgggatggatgatagtaaatcgtcaaagcgggtggtggttgtggatcagtcgggaagtcgccaaggtatcccgaggtctgagcaagggaaaaaaagggtcaaggccaaggctaaggcatagcagggcaggtgacaattacactatgaacctcgtgtttggggtagaaaagcacagtgtgacagtcaccctccccgagagccgaggcacagacaatcatcggattggacaattcgacgcctcgaccctcggcctggtctgggcatcggactcgggtaaatgacctgcggagtacggagtagtccgtgcttgggtttgctggctctggggattccggggacaaatcatagaagaactggtgtagatcatgcgagctccagtcttggtgaaccggagtccgtacttagtacttaccggcgcctgtagttcctcccgcacgatgggaggagagtaatgctggtgattgatgaattatgtattcatggtcgttgatggagatttctactgatggtgcacggggattgagcatccccaggttgttgcttgggatgtcctgcgcgaagaggagaaatgactctatagtgagtttggtgagtgactgggtaggtttggggtatcgtattcggtggcgtaccctcatccacgtcaatgacctcttcattggcgagtaggttgatgagttggtccatgagttggtatctatggatgttatatggatgttctaatgtttttatggaacttttatgggttgggtagcacgttaagggatcacgggaccaaggcatataaattggatattggatatgaaatatacccagaatacaatatttatgccaatcccagtgcttctacacttcgtataagagctatgacttgtgaagaattgttgggaaacccaacagaaagggataacgggacctgactgaatagtaacttagcgcttatttatgcaatttcgacttatccataacaaaggcttaatttcaagaaggaatcaactgaaacatattaaataaaaacaagactccgtgcgtggtgaaaatcccaaagtcccaaagtcgaatatcaacccgaaaaccttggacctcctgcgtcatttgccgaccagccacatatccaacctgccagggcccaactttctcctcttccccggtgaatgctcagttcatatctcattttaataccccatcttctttcttgacttggtaagattctattccaactcttgttctaccccgtggcttgttacagctcgtgtgctttgccccttcctagctccgtgctattcccgcactagctaaccgccgtccccatcgcgtagaagatctttttctttaaatatcctcgatacccggccccttccgctttccctttgagcgagacacacagtcaacatggcgacgcaaaacattcacctccagccgcgcatggtcaagaagggccctttctcaatcgaggcgcccggatatgagcccgtccccggtgagacaatcccacgtcgacaccccaaggccaagaacggcctcattacgaccctcgaggatgtctctaccacttatgagaatatgcgccggtctgctcgcgtctttggcaacgccaaagctgtcggcagtcgccggctcatcaagacccacgtggagaacaagaaggttaagaagatcgtggacggtgttgagcaggaggtcgacaagaagtggacttattttgaaatgagtggttatacctacaagagcttcctcgaatatgagaagctgtgtctggagcttggttgcggtctccgtaagctgggcttcgagaaggagggcagaatccacctctacggtgcgacaaggtaagacattgcgcctccaaagagattcggagccagatgactgacttgattattcttatagcgcacactggctggccatgtcgcacggttcgttatccctatttccatgacgcgaacaaacccactaacctactacaggtgctgcatctcagtccgtgacaattgtaaccgcgtatgataccctaggcgaggaaggcctaaagcactctatcgttcaaaccggtagcactgccatcttcctcgaccccggcctgctgaagtcgcttatcgacatcctccggagcgtgcctacaatcaagcacattatctacaacaccgacacggaaatcgaccagaagattcttgatcagttacacagcgagtttattcacatcaatgtgctgagcatcgaggacttgcgtaagcagggcgaggagaaccccgtggagcctgttccccctaagccggaggacctgtgctgcataatgtacacctcgggcacaacaggcgcaccgaagggcgtgccattgacacacgccaacgtgatcgctgccagtaagctggaaagaatcctccgaactgtctattaagctaatatctcgcaatagctgctggtgtccacaccgtcatcggtccctgtatcaaccacacggactccctcctgacctatcttccccaatcgcacattctggaattcatgttcgagaacctgtgcttgttctggggtggtaccatgggatacggtaacccccgaacgttgtccgatgcctctatgtggaagtgcctgggtgatatcaaggaattcaagcctaccgttctggtcggtgtaccggccgtgtgggagtcagtgaaaaagggtgtcttggccaatctaaacaaggccagtttcgtggtcaggggtatgttctggggtgccatggcagccaagagtttcctcatgtccaccggcatccctggctcaaacatgggcgcctcaattttggacgccgttgtcttcaaaaagctaaaggaggcaaccggaggccgactccgtgtcatcatgaacggtggtggccccgtctccaaggaaacccaggtgttcttgtccatggccatcgcccccatggttagcggttacggtctaaccgaaacctctgccatgggtgccctgaacgaccccttggcctggaaccccaatgctctgggtgaaattcccgcctcgatcgaggtcaagcttgttgacttccccgatgctggatacctggcctcgaaccacccccctcagggcgagattttcatccgcggtggcagtgtgaccaagggctacttccacaacgaggaggagaccaaggctgcgatcaataaggatggctggttcatgaccggtgacattggcgagttcgaccccaacggccacctgaagatcattgaccgcaagaagaacttggtcaagaccctgaacggtgaatacatcgctctggagaagctagagtctgtctaccgctcgtctcccgtggttggcaacatctgtgtctacgctgccgaggaccaagacaagcccattgctatcattgtccccgtcgaggcggcactgaagaagattgcccacgagaacggtatcgatggtgacaccatcgagaccctcgttcacaacgaaaagctcaagacgatcgtcttgcacgagctgcagtccgccggccgcgcgggtggcttgaagggcattgagattattaacggtatcgtgctatccgacgacgagtggacgccgcaaaacgtaagtgattctcaagttatctggggctcgaactctgctaacgagacattagggtttcatgactgctgcgcaaaagctccagcgcaagaagatcgtcgcccgctacgactccgagatcaacagggcctacggcaagaaataaaagcgtgtcaaggtgcttcattcactggatttcgcttcgcccttgtgttttttattcctattttatttccctgctgtattgcttgcgctttgagaccctctctgttattttcactgttcaatttatgattatctttcgtgactcttgctcttattgatattctgccacgatgaagatgatatagtaatcaatgtgggcatgaaatgatcggcatcacgaggacttagtctatcgtaaattcgtaatcgacatatgggcctcgtattctatagaaatactttttgattggctattctcgcacccaaagaggtttttagtctaagaatgtcttcaatgatttcatttacccggccagctatcatacatccagcaagtctatcatatacacagaagtacaagcatgtacgtagcagtgctttgtccgaagtatcccggtacctcatttatcagccacagttacaccaccccccagcaattcacaagtatccggggttgtccatgtacctggcaggacttagcggcagacaaaaagacacacgttcgaacccgtcgcactggtacagattgaagtatagtcatagagttcgctagcctcagttaccaagcaatcccgtgaccgaaagtgtagatatctccacgtgactctctgtccgttgagtagcaagttgaaagtcaagtcacacattgcccccattattgcctccctccaagactagaataatctcattcccagtccaaatgtctctctggaggtacgtgacacagctctaaaccgaccaaccccggcacacaccaacacccggactaccgaggcaagaaagaaagtcaagaaactaacaagcctcacagctcctaccgcggcctcgcccccaaaacccgggccctgttcggtatcggtctcatggcctgggcaggcatcggactctggaccacgccccaggtagaaaacgcattgggcatgcagcctacgagagaagagcaggatgcgctggatcggaagttggcggtgcgcgtggtgcgtatcggaggggaggaaggggagatatcggataatcgagcaaactgagcaattgatgaattcgacgaagacaaggcgcgggaatggactctgggagctcatgtgatcagcccatgggctggtgatggcgatgggctatggggtgtgctttgtggtcggctgtgattatctacgggagtcatgggtgcagtctcacggaaccacggacttgaacgcgactggtcaggaaagggagaagagggaggtgaagccagttcgttgcagactgccgggctggtacggaaggaagtctttccctggggtatttttgttgagtcaaccttcctccagaaactcaattgcaattgcaattgctgcattgttgcaattcgctgtgcccgtgtccgtgccagacgtctaaactgtctatctacataccgcatctctatccatccccccaacgcatcgggactccgggattcaaaagaagacccggttcggagccggatggtcacttactatgtacctacactggaaagcggtcatagcgaccagtctgccactgtttgtctcgtcttcgcgtcccgccaagacaaaaaaagaaaaacaagcaaacaagcagtgctcagtggctagtggctgacgccccccgttctcgatgtccgacagacctgctatgcgcgtgcacgtcctcatcggaaagaccacagggaaatcattccggccgtaccctgtctttgcccatgctcatgcccacgcctgtccgtgcggctgcaacgaccccggcttccactgctctgttcgcagcacagagaagtattgggttgctgcagtcagcggccgtctttccctgcctagcctcacctcgcggacgttttattatttcctttctggggcattggttgggcattcctgtggctcggaagatttactgcggctgagagggtggatcgttgcttagcctggcccggatcgtgacatgttggttcttgtggcgaggggccaattagaggtcgattttaatttccgacctttctcttttgtccgattgggaaagtgatgcgaggggcagtttgtctggttgggattgggctttactacgattgtttgtttgagattttgggatctccttttctagacttcggtcatggtcagttcgtgggttatttggaatatgcgtgtctaggttagcttctactctagttatcgaatacttgtcgcattgcctagatgggacgtcttagggtcatattgttccaaggtaatgtgaaactattatcaaaacacgttatatcgataagtctaaagcaacaaacctcgtcggtatacaatcgtagtgcggctccgaagtattgtttcggaagttagttctatgattttattcatattgtagcacgagggacctctttacccttagaagaatcttgtgcatcccaaagatcgatgctcatcaatcggggtaatcggagattcgatccatagggactcttcgtcatgccagtctcgatagattgttttcatctttattctattcatagatgccatgatctcatccaaactcgtagttagctccccgagaaagctattttcaaaacattacctcggatctacagagcggtcatgtgttatttcgggtaggacacgactagcaccatgctctggaggccgttgaggtggaacacgaccatgctccttcgatggctgatagcaggtaaacactttagctgatccatagctccatctggaagaaataaccaggtacgttcgaacatacgtagaagctagcttcctagctcgcaatgcgtccaagacaagcggcgagagtttgtattagagcagctgtggcatggacagggttttttcctagtgcagtagcaaaatcgatcgcggagatgttcatgcagagatatcactgtccatatccgtctcttaggcaatagagatagatatcttaccaggctaattaggttaaatatcaagtcttcagacggattgtcttatgggcgtcttggctcgatcacggatagggttgattatcgtcgtactgacaacccggtgtcctttacttcaggcttgtgccttgccgctatagaacgtagtctccttgcttttactcttgagctttaaatgcagttcccgggatttgttgacgctttttattggtgctttctgtatggatattccatgctagtaaactatggtcgatctcgcgtggagatgtgaactctatgccagtcctgcgatgtctgatcttcagaggattgtagattatctgcgtaggagcaggagtgggaagcatagcaatgtaacctacttgactgtgacgatagagtagatcaataagattaaaagatgtagataagggcacatatacggaaataccatgaagtatgaaatagtggcaacacaccaggatatcaaaatgcccagcccgaccaaagaccatattaggagtgtcaactcaaggtgtcgaataagaaccccaagcgcctaggattgcccttttgtctgactccccttgtacgacgtgcagaagtacctatccaaccggtcatgagtaaacaaccaatgatattagacctaccccaagtatccgagcatttttctcaggaagaatacaaaacatttattcatttcccttcggaatgggaaatatacacccctccagtggcaaaaccacggtatataccaacgagacttggcacaaaagctggacttgaacccaattgtttcagataaagtcaaaaatagtctaattctaacaagaaaccctcatgatccacatacttactatatctctcaaatctcttaccgcatgcggatgtaaggtttctcccccggcccttcacaggggatgttattgacaaggatccgagtgtttaaaacatcggaatatgccgaggtgcagcgcggcttggctgatacgagggtatttctcctttggataatttaacatgagacatgaacaggtttcattggagagattggatcttttactttagcataccgtcgaactgatggtcacaccaacgcctgttttgtttcacctgatatacttagatagagataatcgcatgttgaatttatagctaatagccagacagggctaagctgacatgtacgtacattgtcatgaagcatgacctgcactgctgccgatcaggatctgcatctaatgatttcttacatttaataatacgattaaagtgaaatcctttatactaccttgctataaatctctgctgcctaagaaagcaaaccctagccctctcagaactcaacaaacagactgctccttaactctccaattggctcgaaacaccatgatccattctgcatgtaaccgtttctctcggaatatctgcacgtacaccgtccacgacggaaatagtgcccaccttgcttcgtttggttttcaagaccggagcctccccaaaaagcaaaagcaaagaaagtgggaattaagtaaaaaagaactagtaatagcgccacaataagccctttaatcttgcatggccttttaatgaactcaacccaatcattcgctcattcccgcaggcgaaatccatgtttgcttacttcggcgggcgtcagtctatgtagtcatcagacacgaaaaaaagagtcctggaagcaaattaccgtaggtccttgcttcaggtttgattgggtagttgagtttgggagaggtaaaaaataaaacaagtcaaacaaaacagcagaaaaaaatgcggaaaaaaggcaaaagcatcaaggcagagaccgcataagtccatatccattgaaaaccggactggcagccctgtaatagatgaagaccaggaccaggaccgcagcaaataacggttcctggctatgaagagagcaaatcggggagtttaggggtacgcctttaatgtttgttttcgaagatttgtgtttgtactataacctagctttgttgtgatattgtctttgtaccaatacttagacaatgctaattcaactctcattatcggattactataatatcaagtccagatcttaatcaaatcggttctattcgctagcatattccgacatttgcttttgaagacagtcttaatggcattctgtatgctttttctccgaggcagacacatgaaatgagacagtatctcgagtagaattggagcgaatcaaaagagataaagaatagatcacaatgaaataaacaaaggccactaatcccactagcaaccagatgataggaagaataaaataaaacaacgaatagaaatggcctcatgatcccccacgccgtcctgcaccagtgcataaccccttttccatttggtcgtatcgagcatgataaaaagagaaaacacgagaagaaatcgagataattcagaaaccaggggcaaaacaaaggcacagcctaagtacatagactatgcgaattctggatcggatcgtaacggctataattcgttgagtagacggggtcatatccaccagtattagactggcgatgttggtggggaacccctgtgtaggtattatcctgatatggatctgatttgaggtaaaggtcagacttgattgtgtccatggggtccatagtgtcaatcattgagtactcgaacccagaggaagacgaagaggagatgagaggactgtcgctgagtggagaatggtctgtaacgttaattttccgatgatcggatctgccgtaagaaagaccatttcgatgcgacgtgtcgtacacgagcatgtgggaacgacccgtttggcccagcccatgaggaatgacaccacaggtgttgtctccgccagccccatccggacccatgctaccagtactgccacggcgtccgtccttgtagtgaccgggtgaacgtccgcggacgaccagggggtgggagtggcgccgggcgatttgtacccactcagtttcacctgggaccgagctagcaacctcagcgtacagttcaacgaccagattgtaatattgttgctgggcacggcgcttgccattgttggcggtcgctttctggaattggatacgttcgaatacgtgggacgttggaggctgacatggctgaggtgtccccgtgaaagaagggttgtagtccatagattgcgagccaagggggaatcccgagagacttccattaactgttgaggttgatgtgaatgaaggcggaggtgcaggctgaagaatgacacgacctggtttgcgttcggattgcttgtctcgctttggggtgtgttgaacaagttctcgagtttctccatattgaccgttcacgatagcagaaatggccattgaaaatccacggattggttcaagggtctggtcagggtagcggatgtatagaggagcattgggaggccaaggatgaaggccaaagccgcaggtcaccgcgaagtagttgcggcgatagcaagtccacttgccctcagccggaaagggccctcgacccatttttgcttggacatctggtttcaccgtctgatattggccaccaaactctgcaacaactgtatgaaggatagtcgtgtcgtcgaaaggcggagcctcaatctggggctgtgagcgttgtggggactcgactatcggttgctgatacatattattctgagatcgatccatcccgctgtctaaggcgcgtggagtgcccggatacccatgacgggaaagatcgttcattccccccataggcaagccgatatttccaattccgcgctgtaaagcgtatgaaccgtaggaattattgcgccccatgagtgccggaatggagttcaaggcatgccctgagctctgcatccccgtaggcattccagttggcggttgactagaggaaagatcagtactgatgaacctcatccacctttacaggagcgtaaagcttacagcgctggcacccgttgatagtctgccattctatcaaagggatgctgaagtcgagagatatgtgggaagaggggaccagacgtgggcgaaaatgagtcttcacatcgcaatgtatcagtcaaaggaagtctctcgggattgaaagtaagaaagggcttaccaggacaagagtcaggcggagtcattgcaagagcacccgaactagaatatctaaagtgaagaatggctcagtaacagctcatcatggggaatccacgtgcgatcgcctgtaattaaaacagtccagaagatatcatatgagtccgggagcggcacggaaaccatgatgcgtaaaaagacaatggaaacggggggcgggggcgaaagaggcaaggacctcaagacacggcacgagctcagatgaaaaggacaaaacatcggaagaaagacatgcaggcagcagattggtatggaaggtaccgaaacaggctggactgaagttcaagctgcccggacccggaggaagcgcagcgacaagggggtcgagaggctgaccgagtggagcgcaagggcaagtccggattgaaagaatggaaaataacttactgtaaatcctgcatcaaaggatgctgtgcgtggtacctcacgccgttggtgtcaggcatggagacgagacctccgactcgctggctgttgtcgtcttcgtccgttccaaaccctgtcacatgagagttcatatagtcaccctccgaagtaacgggatcgttcaatgagaatacctccgagagaagtgctgagaaattcataggttagagatgaggaagatatatggggaagagaaaaaaaaagaaaagaaaaagacaaaggcaagagaaaacaatgtcgatgtcgaatcaaccgcatgacggaataaacagggaatgaaaaagggagaagcttacagggattcatcctgagcgtgctgataccaggtgcctcgaggaccctgaagtttttggtcaatgtaacaccgggcgagacgccaaagctgtctggcccttgaggtcttgggtggcaagaacttgatgtctagaatagcaaaggttaggtaaacacacaatcaaattctctcacagtacttgattgttacctttgacgtctggatcactcagaaggtgggtgctttgagcctatagaggtgggaaaaaatcaatacagctcctcttggtcttggagataaaccaaaacacaattctcacaagaagttgtttggaaggcaagtagcaaacacggagtaaagggagggtgggggagaaagaacgaagaagtataaatgaagataggaaaggcctttgggttataaagtgagcgtgaagagtaatacaatatagtatgctcagtagaacggtgcgtaaaacggtgcccttttcgatgttgacaggaagtagatgatcgtccgggagccaaaagtgcgtcaccggtttatagacatgacttcctaattgggcgatctcgcattaacttaagtcataggtacaaaagtacaagagaagagtgttggaatcgatcgggccagaacttatagtgttctttgcaaagatcttaaaggagaggggggtatggagaaagagaactgtagagaagaattagcccaaagcgagcaaaaagccaagaatcccagaaagcacaataatagcaaaatagcaaaatagcaatcgcaggccaacggaggggcaacaaaaaagaaaacagaaaaaaaaacaaaaaaacaaattgaaaaaaaaaataatcacagaaggggaaaggaaaagacactgatgtaatctggtgtgacagcctggggacgacgagcaaataaaaagctcttgtcccggcacaaataggtaagtatcttggtattgcagcagggtacttccacttatgcaaccctaacttggtatttaagaacggccgagcagatctggaggaatcatctcttttgacaggttgcaggaagtagatatgcgcttacctagttgtatagatgtataggtatagatagttgtatagttgagtagttcgatatgagggctgagaccagatgtatgtgattgactttatccccggaattaacaaaaggttgcaattggtatgttctacccaatgaagcttccggtctatgatattgtctagagccgttctcgggattgttggaggatcattagtctatcctggtaaggctcagggcccactagtgatggtctagccgagaggcgactataaccacgagttggatctgccagggacagtgaaatacgctgtattcggtaaggctccaatgggggtggtggatttgcataggggtccaaccataatcgaaagatatccgggttatcattttctgtgtatgatctctgtgggaaaaaaaagaaatgaacaattttctttttcctcaatcatttgtattttgaagtcaggatttggaattttgacggggtcgagcgcaatgaggagagtagcatcaaatcatcatcggctccagacagtttgattgttgaaggcgtatggcattggtcagaacaccccatgtccacgggttgcgtgctagaaggacccgacggcggctgcacggaccgtaggtaaggccggtacgtacacgttgtatgtgtttttcattacagataattcccgatgggatcagatgtcctagtgcgaatacccgacagacgggtcgctgcaggagagcgaaataagatgaaactagaaaggatagaggagatgatcgacctccgggatatgtaactatgcagacccatgacagggacggttgatgtatcagacttggaggaccccagaccaatgataaaaaaaaggcgaattaaatatgagaaatgaccaaatcgggtagaagtcctgaccgaagtccgtaatgtttccaaggtctgtcggagtagttcccgtcatatttaattcttttaagccgtaagaggctcgaggcacgagctgcggttcttgcatgaaggaactggacgatcatgcgatcgacaagttccattaagcatgttgcattgtccatgttggcggtgttcacaccgacagaaccggacctgggagagcaataaaaatagcacgttcgagacgatgcaccccaagatggagtatatctactccactccgaaagagagattgttctggtagcggtttctcttgcggcgcgaaaccgtgccctaactgcagacggggggtctccagtctccactagagaggctaaagcagctcggtggggtatacaatgattgcggtccgtacccgggagccttttccagaaatcgagcggcactagtcccaccgttccgtcaatgaaacgtccagggaactggaatagattggaaagatcctggtctccatgagtggacagtcctgatcgtgtcgacagaactgcattagtggctagaagatcgaccatcctgcaggaggctgggtgagatggcaaggtgcagtgaagaagcacccgcaagcttgtgattgggtagggtagataagccgtatattcgatttcctcagtggttatggcgggtatgttgtgcagctattcgcccccacgggcacataagaccgtgtgggtaccgaatcggtagggagtactccgaactaggtgcaggattgattacccgtaccaaggtaataaagtactgatcaactataccaactttcagaattccaagggagacaatagtgaacaataacatatttctttttgactctggggggtcagccccttcccggatgacggggctgacacgtgcaggggcggtgaactggacgagatttatgtagtaggtacgtgggttttcatattagattagtggataaactatgtaccatgtacttgtgttctgcctcctattagggcagtgcagtaattgttgatgcttaaattgatatagccagcatacatttcattcgaaggttaggtgctaaaattagggcccaggggctatattcctagttcgacattaggcgccaattgaaatcaaataatttgtgcaactaacccccccggaagacactatcagatccatcggtccacccgtgaactctccacatgtcacttttcgacatatcaactcactctacttgtgctcaggtacggagtacagaactatagatacaggaaacgaatgcccgcaaattgtccgatacggtacgtccagggctcactgcaggtacctcgaagccaatgccaataatttgactttagaaatgcatgaacccatctatggatgctctcgacatggattagccccagaaccctagaagccggaaaactctgacagcttgacgttgcaactgtctcagtccatctgtctctgtttcgggcacgtgccatctaccgagtctgtcctcccaatggttgaaatctcagaaaagaaaaatatatatattcccgtgcaacaattcttggctgcacgtcaatggcaaatccaatgccatgcccttcattgctggttacattcgggtgttcgagcttcggacagggggcgcaaagctacagctcctgccaacggtagagaagctataaccacatcccggagtcgggattgctgactcaaccgtgttattcgccctggagatcagaaaattcaaatccaaaaaagaccattggccaatctcaccagcgtacagatccagagtgtcatcccagacggttatctccccgggtcttgctgcctcagccccatatgcttgttgctccaggatctgaggatgcgacacgccccatggacccataggccatgtccaatgcgccaatcctggtcgatggggtctagagttcgaagtcttgcatgtcggggggagatattcctggacgatgactaccaagtaaggaaagagtcggcaaatcctcctatccggagacaatcctgtgaggcttttctttctgccttggtgattgagacagattaaagttttactttaccaacggccgcggcctctagggcttccatccccgagacatccaccggccttgtccgggcgtaaaaattgatctacctaattctaccagtatcttgtaccatgtcaagactcataccatgtcgagctagcacattcaaggaaaatggtatgatttccaaactaatttcccttactcgcatccatggagattaaacagttcaggcctctatggctccacaattcagcattgggtcgcctgggcacaaggttctgtgatgggttacctgtgtatcacttcttccgagattgatggttactttcagtgaaagtagacccgagtactggtggcctactgcaatgggctagaatgccttgctgtgggaaattgcaagatcagtccaccctgcttcgccttccctgtccgcgaagacaagagtttgccccgagaccaggatgatcattggcagtttccccaccctatgatcccaaactttgatcaccctggatctacagcccgccagcacagatcgtatcacgaccacgaagctccggccagaaaagttccatcaacgtctgagagtatccgaccctgtcggcgtggatggaacgacaaggcatcaaccagacaaggatgacaatggacagaagggtgtttgattggttcgccgccctccaattctggaaacgaagcttgtcaggcgaggaatatgctttggatggcgtgggatgcaggccagttcaagactccactcatcagccagcagcccatccggccgtttttttgcctccccgtggcaattctcagcccttgacaatcatcctgcgagtagctcagccaaccccaagccgtgccggtgtagcacggaggaacggccaagacaaaacttgctcaccggccgaaacgctcccagtgaagaactgcccttctggtcaaactcctcaagctaatataagtgcatcatgttgtttggcgccgacattccctgcaaggtcactaagacttcggaacgtcacgaacgccctttcacatgttgatgcagccgtggaaaagtggcagcgccagaacacggtgggctggtgagcgttttcgagagagccaaggccaaacctgcagggagcaacatctcggcctctccactgtctccgtagccccgtcttgtttagtatgggggaggccttcggcgaaaagccggacccgtaggtaagcttttcccacatattcaagtctctttcctaaaagaaacaccgatgctacgttatgcgacccatcccgttaccgggaaatttaacacgacaactgttgccgccgaggctgggtctgtgtctgacttgctgagatctaatatcgactgtactttggtactttggtgattgaccctgggatctggcacccgagcgcgtagctagtacgtagttggcctgaagctagggcacaacaggaaaaaagtccaggttgcccgagctccatttccttccgatgtcatctccactgtcatgcgaagatgcagaaaatttgatgtcgaaatgcgatccctggagccctttgaaaaatcgaacagtcgagacctgcgacgtttatcttccagatgacagattcgccgtcaacggcgtgcaggattgttgtcagccgagtccggtacctgggcactaggtgtggtggctaggagatggagatttgtcaagcctgaagccagcggcgagagagcttgcaaagagcagaatggccttggttggcatctactgttatcatgttaaccagtttgagcttttccgggagaatttgcacattaacatgtctagtggacgttcaaactgcgtttcgacccaacactgatgttcatccccacgcttatccgcacgccgaaaaagacctgaaatgctgggcaatgaggtatgttcgcagaattgcctatatattgttttgagacatcgtccgttcatacaagcacgggttgatttccatggacgcttgagatgttccatggtagcgtgaagcaaatatagaacaagtgcttcgagaaggacattattggaagtaaagaaacactaccagggatgagggtacgaccgtaaaataaccaagaaacccatgtatgaagttcaaaatttctctaacccattgcttttgtatcgaccgacgaatataagtaactgacatgcttgatgtctttttgggaatcatcattatcaaccaggtcctacagtacaaggaaaagagcttcggcccaaagataggcccgcctgagaagaaggaaacgttccattcaaaaagtcgtaagagagaaccgagaaagaagtttaagtagtgcgcttggcgaactcgacgcggagaataaggtggcggtaaccgactagcagaagaacgggttagcactcgaggaacttgtaaaaagaagatcacgaatcggagcgttgaagacatacagccatccaccttctcgcaagcaagtgctgcgtcgccacgatccgcatagctgatgaaagcaaagcccttggctctctgggtttcccgatcccgtgcaaggaaaactctggtgacacgaccgaaacgctcgaagagatcccgcaactcgttctcctctgccaactcgctgacctatttgaaaaagtcagtaccgaaccaagataaacaatcacgatgctcgtagagctcatagagctcgtagatagcagaataatggcagaacatacgtttgtaactctcagtgtcgccaaatcgtccttctcgaagcgaccacccatcttctcgccgccaccagcaccgcccttccgcatgtgaggaggaacgtagctggactttccagcaccaagaccacccgcatcgtcctccgcctcggcgccaccagcagcagaagtgccctcctcgacgggggccatggtgtccttgaagggacagcgagccgtgaaatgctctccactgcaaatacgacacttgaccttcttgtccttcaactggtccttcatgctgcccttctcgggaccctccttctcagcctccttagcattagccttccagttgacgctgggtcggaagacgatgttctcgccgacggaggtggtgtcgaatgagggaccggcggcgtggcccttctcgagaccgaacttgtcccatttgcggcgttcggcgacctgagggttgacgtgttcgcggacaatagtggtcttaattcggcgggtgaccttcactttcttgttgtcgtcattgtagcggtaggaaatgacggtcttggtgccgtccttgttcgcgatcacttcttgcggcgggagcacggaggggtcatcgaaatcttcgtcgtcggcccagtcggcgcggctgtaaaatagaaagatttgttaggccggtgttttttgtaggatgcaactgtgtatactcacttcccagctggagacatggtgtaagtgatggtgttattacggctgctgaatttctggatttctttcaaaggcgaatccgttgtggatttaataatttactgtggcacagctgtggctggtggcggaaatcacgtggcgtggttccaagttctgttgaacctcgttctactctccgataaacatgatggcattcagcgagtttcattcccttcaaacagagtgaatattcgcagtggtcagagaatttattcgccctcattccatacttcattttgtggcacttttcctatctagcaccgagcatagcctcaagcaaggctagaatacgctccctcgatatgcctagagccaaaaaatgacacggacttccattgcttcctctaaatgatccttctatgtacgttggcttgtcagttccagataatcttatagttaccatacagactagtcaccacatggacacacaaaaacccattgtggagtatatactcgcaaataatatcaaagtcccgtttcaaaatccttcaaacccttcaaatccttcatgtcgtcttttgaaacgggattcacgatttgtatctatgctctctatctcgattcttcagatctgacaggagctagatagccacctaccgctgcaagccccaagtttggtgttgatcggggcgaaattatgtgccatgcttgagaagcgtttttcataagttcatgtattcactcagatcatcacaaggaataatcttacttagaaaatacgacaagacaatgccactcgagtactgttatatcgacctcttactcttaggaagtctagcatgcatgaatacatcatcattttcttcccttgatcctcactggggggtgtaaggagggaatgaaatagtcgccaagagcactcgtgattctctcatatcgctgcttccaggtgggatcggtctttgctacagtggctgtccaggcaaagtagtcccataggatgcagatcttcttactaggcataagaagcctgaatacgccaacgacgtaatccgtaaaaagtgccatctcccagcgagagcggatcatcttgttgatcctccgttgttttttgctttttgcttgcgaactgcagtttttggcttggctggaaaacgcggtatgcactcgttccgccaaaccccccgtccacccacctccaccacccaatcctccccatcttcctcacaggaggtgtacgggcttccacatcatcccctgcatggatcttctcgccggtcccctctggctgctcgccaacaatgatatctttcaggctattttacgatatattagcctctgtgcatacataggcaaagatccgccaatgtagtttccatgagaatcgtgtttcaccacttacggggtatcctcaatgtcctcgctcttggaggctggtctcctccaaaaaaaaaaaaaaaacaaaaaatagccggtgccagcaaggcaccagctatgacaatcatgagggcccaaaagcctggcacggctaccaactgttggctcatggaccgagaggtcccggaggtagaatctctggagcatgacacagagatgaggcttcccatgctctttcttaatgaagatagagtaatcagaatttgtaggataaaccccatagaaatcagtacatcatgaagtcacagataccattctcggggactttgcatctgacagacggatatcagctggtggaagttcgaagtcgccgtcgtcatcgaagtcgatcctgtcgtggtactgtaggtcgggtcctgcagttgcgattgacagttatagattgataaagatatgaagaggaagagatgtgataatgaggtgtgaaggggataagtagagtcaagtcgcgaggggaatggaatgtgaatttaaccgggctgatatgatttcagaagtgacggtaatgtaagagttagctgagtgagaactgggggatttggcgtacaagtcatatagaaggtaacatttaggagtgatggtaatggaagggtaggtgaggaaggctgcgtgcttatatatatatcgtattagggagagcgagaagcaaaggcgagtatgtaaaggtgtaatggaagattcctctttttgtacattaagaacgcaaaccaaagcgtttaaatggccatatcatcatttgcttctcacgtgtacaaaatagcataaaagatatctagaaacaaatcacagatcaaaaatccttcaaagcctcctcagtccaatcccacaacctctccgcaagcgtatcatccctcgccgtctcatcaagcttcttatcctccaacttcccaacaggctcataataacccccattccgaatctgcgccttatccacagtagccgcccaagtctgattcaacgcaccctcatgcggcagcacaatcctccaccagcttatcgcataaacaagcaacttctccttaagcccaagaccactaacaagacccgtccccacaataccaggatgcaccgatacagacgtgatagccgggaacctcttcgcgagctcgcgcgcatacaccagattcgccagcttactctgcccataccgccgccacggcccgccgaaccccatatcctgggtcgtcttgagtttttcgaagatgatgccgccgtgcgggtgcatgccccatccctgcgaggtaaggagcacaatgcgtgggtctgcgcaagcctcgaggaggggtaggaactttttgatcagtagtgcgtggccgaggtgattagtgccgatttggagctcgtagccatcgactgtttggcccgggggttgtgccatgattcccgcgttgcacattaggatgtctagggtttggtgttggctggtgaaatcctctgcggcctctttgacagaggccagggaagataggtcacattttatgaatgtgactgcgagcttggggctggtttcgtggatttgtttgatcactttctctgcgcttgtggcgttgcggccgctgaggtagatatgtgatgggttgtgcttggcgaggtggattgctgatgctgcacctagcccgccggttcctggggggctgttagttttggacttgtggaaagcagatggaatttggtttatacctcctgtgatgaaaattgacttccccgcgagatcagggatatctttttcgggattatagtcgagaggcatggtcgaggtgtgtagttagggctagatatgttgcgcacaatatcaaggtttgaaagtatgttggattgacttggaatagagaattttagtttgaaataagaagcagattaagattcttgccctgcttttatactgggaggtgcacgatttccgtacccaaagatcaaacatcaactttccggattgggaaatatgcttgaaggctccacatgtggcttgcccagccaatggaaaccaagagtttccgagctcgccaatacaatccgcctatctggcagtcttgatcatgattctttacgttcgctggaacggcttgatattgtaccgaagagcaagtggcgagttttctgaattcccccgagtccgacggtgaagtggcttagacgaatgtcagctatgtagcaatccttgtaatctccgttgcaaactccggttgaaaatcgttgaatgttgaaaatgatgcaatatgttgtaatgcaactatgcaaagataatgatatgcacaaaattataaccctattcccaatctaatatgtacatcgcaaaaacccaaaatcaaaacttatcgacctatcatacgaagctcaatcggtcgcaagatgcaatataccgcagcagcaaaggcaaagcctagctcaaatccaacgtcaccaccatatgttgggtcaccagcatgcgcggcgataggacccatccaccacgtttggctcatgcccacaacaacaccggcgacgccaaaggcaaacgcaatagctgcggcgattcccatgggcagcttcttgggatcgtcgtagtcctctgcagaatagccaccgaatccacgtcggaaaacaaagtggtcagcgagtacaatgccggagtaaatggccaaccagtaggcgataagggccatgaagttctcgagaacggtctcgaagtggctgtaaccggggatggcgatggcgagggaagcgcacgaagcgaggaaagtccagatgaatcgcgggacgcgctgcgtagcccggctcaagacctgcaaggtcaagccgaccgagtagatgttggggcagttgttggcgataatggacagggccaggacgacgaggcagaacttgccgaagccgccgagaggttcaagcacggctgcgagcaggccaccgttgactgaggctgcatagccctcggcgtacttgttgtgaactccgtcacccatagccgtcgcggacatgacggcgataccgaggaattgggtgaagagaagggggacgatcagaccaagccaagcagaaaggaagaccaggcgacggctctgggtctttggctggtagacagtgtagtcggcagcgtaactggtccagccagttgcgaagccatagacagtggatccaaaggacaagcaggcacccatttcagaaactccgactcccattgggatgttgacgaaatcgccggagtgggcgaatgtgcccaacacaatgaaaaacacgatgcaggtgggaatccagctccagtactcatacatgtgaacatacttgtacccagcaaaggtgacgaaaagtgtgcagaatgtgatgatgaggataccggcgaatccagggactttactgttcaccgcgttgaggagctgggcaccaacgatggcattggcagcagaccaacccacacaggcgatgatgttaaggacggcaactagacatgaattagcaaaattaacgcacacaagctgatggagagccaacttactgaatttcacaggccaccatccaaaccagaatcgcgagagcaccatctggcgcagtccaaacatgggaccaaagcacgagaagtagcacacggtcatgacaccgaggaggttgaaaaagagacagaccaagatggcatcaacgaagcccaaatcgaatgcagatttaccaagaacgccgatggcgaaggagctgacgaccatgtttgcggccaaccactaggtttggtcagtggaaaaggccttcaggccacggcgatcacgccaggtaattgcaggaacacaccatgctaccaatattaagataggacgtatcagtccgctcatgctccggaactcgctcgacacctcgctgctcgatgttgagcttgccggctaagcgctggatcttggcgtaaagtgaattgccatattcgaagctctcgccgggcacggcgccatcgctggagttgtcgaagagcttgttgctattttgttcggaggcattgttcacctggggcgccttttccaggtcctcatgtgaggggaacattttggaggccatgtttgcaggtcgaatcctcattaacgtaaggcgaagaattggagggagacgagagtatataatcgggagtaatcgaagagctgagtagtctcagcgagacccagggagttcaggatgaagggattgatatcgaatcagtgacacatcctctctttcttttttttgctccaccgaacgggaggcgctgttaatatagtattgtgtcgcgagaattctttgcgcgtccggccccaccacgatctctcgcactgtggcaaggatattcctgtcgcgtgttcctcgaaaagatccataaaactcagagacgggccgaatgacaagcccttgaggccccatcaatggattaggtggaccaatcaggacagccctgccaaccctagcttatcaggacgccgagaattctggccttcgcttccgtctcgggacagttggcgttgtcattggccgacggagttgtgtgaacggtggaagtggagtgtctcgggactcaaccctggagataaggacaacctccgactcccgatacctctgatagtgacattactcttcactccaccttgggccagtgaaccttctctgaccatccttttaccaatcacactggcttgatcttatcattatacaggggccgtctacttggctgaactttgtctacacacaacacccctgattggcagcatgccacgcctctctgcctttcaatcaagcttctgggtccttgccagacgggacacgccgatgtgcgtgaagcttagcaatgcttttttaatcttcacgtggtgattctcattatcattattctgtttatgcgggggaattatccacgttccacgcgaggcgaggacctagcgctattggtaccccggatgttctcgggttggccccagtatatcccaaaagcttatgtttctcagatatgtgttgctttaatcctcctcaatcagaaacgggacggctgcgtatagcctgtggcagtgattctcgaagggtcgagcctgtcggacatgtccgcgcatacccaagcgaagacaatttacatgtttgtcatatatttggcttttggccaacgtatccctaccaaaggctataataagcacggcacacggtggcggagattgccgcgctggacttcattggtgcgatcgcacatgagaactcttgacagatccgatcatgtaaactttgcggacgagatctctcaacagatccgatcgtataaacttgctacgatctatgcttgatttgtctagtgtgctcagcgtgaatcaagaactcttcattggcttagaggctgtcgtgtccaaccagacatcatggtactttggatcaaattgaagagagtgatattgatattcgtcagatgcaatgattactgtttctcctgtctattcaaactcattcagacaagagataaaggagctttccgaaagttggactattgaggcatcggatacctccgttcttccagtatttcctcatctctatgtgagcactgagcagttcagctcaatccacgaatttcgaagctgaacttctccggtcaacattatcttacttcactgctggcgcaatatcgctgtattagcaatttagattagcctttgagcatgaagtcattgaatcctcgctctccttcagccgtactccgtacatcccgtttagtcgatttgaaccatgacaacatcatccttacctatcccgcctgtgtttgattgcaccccttctccccaatagatagtaagttacatcgtgatacacatttaccccttgcacctccagtccagagagcccctcgtcgctgtatatcaccgatgcgagtaatagccgctccttccaagaatgccctccaactagttcctaccctcgacctcgagggaggtggttagctcgaaacttatctctcgcagtcttttgaaacaataaaccaccaagacgaattcttcattacgcctctacatgctcgcctttgcttctcgctctacctaatacgagatgtgtaagcacgaagcctccctcaacgcctacccttacattgccatcacttctaaacattaccttctatatgacttgcatgctaactcccctcgtgctcactcagctcgtcactcctgaaatcatcttatcagcctggttaaatcatattccatcctcctcgcgacttgaccctacttgcctccacaccccattgtcacatctcttcctcttcatttctttaccaatctacaactgtcaaccgcaaccgcttaaaacctgacctaaaataccacgacaggatcgacttcgatgacgacggcgacttcgaacttctatcagacgatatccgtctatcagatagcccggggattaggatagagggcggatggtagggtttgacggaacgagtgcataccgcgctttctgcctgagccagaaacagcaattcgccgaagcaaaaagcaacggaggatgaataagatgatccgctttccctgagagaagaagatctgtatcctctggtactactttgcctggacagccactgtccagattctacctggattactcgaagtcaagaatcggaaatacaatgggcctctctacactggacaaggatatttcgtcattgaaagaacagtcagtcgattcacgtcggccaatcctcggtgaatggtccggcaatcccaaaaatctcagtgaagtggaagagcagaacgcagtggcacacggcgacaatatcaacatggcatccaagccattacgtatttgcttcgggaaaacccattcagagctcacaaatgggaagcatcatttgcccatttctacgatattacatacaccgaggctaaagataacgcctctctacacaaaagtccccgccttcgtcgattattcagcctaaatgccagtgttcaatccttacgccgatttgcccaaccttgcatttgaaagagagcaaagtatacctaaggtgtaagcttgttgagcttcatagatagcccaatagaagcctgggctcttgagtgttctcatctgaatttcctttttatggatgtcacagccgcatattcggtcacattgctattgggaaccctagtgcccaaccctggaggaactctgctaacatcgtcgttatatagataccctattttcgcgcttgcagtcgcttgtttgatcacgttgctgtggcgagccctagtatcctttacgaagtggctctaccgatgtcactgtcaccatagctgcccaggttgttgcgtgtcagtcacattggcatgacgaacgctacctagttctagtcttcgccaacataaaaatgttatagtggtcttgccctattcttcccttcttgcagtctcattaaaacaccaaatctaatagccttgaaaggctgatggcctccgactaagtttatgatgttccaaccttggttggcaaacctataagattccaatgtacagtattccaatgtacacaataggcgaaggcggagtatcaactctagggcaagagcgatcaagctcgactagaactttcaggcacgcgtcacttcgacttcgatttgttgatacctctcgggctgttgttttctttttctttcacgtcacatattcacaccctcgcataatcgttatctatctttcctgatcattcacatcctttctttatctcgtctgtgattcgaacagttggatagacgtacaaaagcaatctgaacaaaatgagcctcgtcaaccaagagacaagctctggcactgtgcgtcgtcgtttatactcgctatcatcggtctttcgcccccaggcaaccaagagagctaggtacttacatacaaagaacgaccaaagatgaaagagatagcctgctaaccaagacatcagcatatctgatgcagtgcaggaggagccaacttgcctggaaaagatccactaccctgtgtttgatcccctggatcctcgtcacaacccagagataccgaccgtgctgtgtcattccaatgagcaacaaagttcgtcttcggggtcacgcagtccaatggcatgggttcaattcctctcaaagcgaactcttcataaagctcgatcaggtctattggcattgaaatcagggtttagtcaccatccaagtgaccgtccaagtgaagaagagccccaggagagaagctttgttagccccgttgctctcagacgcgaaattcagcttgaaagacaacgccacgcaatgtcatccggggggtacacttcggatacacaagaggacccgaactttggcgcccagctatctcgcatggaccttccaccgtcttcaccatcatcgaatgatgaaatggagcctcttgtccgcgtccagtctgtttatccgatgcctgcgcccaatcgatacgaatattctagccgccccgtaagtaatgtcagggtaaactcgacttccacactagccaacggccgtgatcttgacttccaatttgctggaaatgaagagttggaggcgaatatgaattttgaggatcactctaatcacacaattccatcgacagaaacgtatttgatacagcagacatggggcgttgcaatctctaccgacgaagggattgaaacgtccaccaaagaactggcagatcctcaatcagttcctggagagcagcaagcaacaaatcttcagcagcaaaatatcggccatgcaagttcagatacacaaaacagcgatgatcaaccaatttcagttcccatttcgagacagtcttccgccgaagttcggtttgcatttccaggaatctatcatgaggcgctcaatgagtgggcgagacaacatggtagtccaaacctcagtcgacacagtcttgatctcattgaatacagtcccaatcccagtcatcacagttccagccccatccaacacagtctcagcccacatagccacaacctcactcaacacaacctcagactctatgaacaagaagaaatcccgtgcgctcctcaagagccgttcgaccgcattgtacttcaggaagatacacacagcggcctgcctccgtatcctggatacgatgaaggtcacatacctttagtattttcgcaaagtccaatcacacattctgaagaaatgcagccattttcctatcccaatcccctcaattgtatccccaacctgaattcggaagaaatatggtcgtctacctccgaaagagcaaccacccagtggtcaagtggggaagattattcaagccgttacacacctgctgataccacatcccgagatatcacatcaacggaaatgacttcaatggaatcaacgacaactgatacatggtctccatggtccccgatggactctgaggtccttttccctagcccagtggaggatggagatgagtatttccttgttgacggcaaaagcagccagtatcccgacggaggcaatgagccagtcaaatccacacggcataccaccagcaactgtgatactactagacctcaaggaccgactgagttgatccccccagggatcatgtccctacgactcatgtccaatggtattaccgatgcagaattggaatttgtggaagaggatacagatgacgagttctatcctggaattgtacagccaagacagttttggtgaaatacctcgtcaatactctaacctgaagggccgcatgtctcttttgaccaaatgtattattacctgaaagatgttttcatcgcagtagttcatcccttcaacatattttctgtagacctattctttgtgctaatattctaagggggttgttaggaactccctagcaagacggtagatacctacaaccaaaggggggtccctggtacaatcccctatataagttataaccaactccagtagtccaagagggacgggaaagagaagtatctcatctatgagtctatcttggtagtcataagtttccactaggttgcaatcaatttgcaaataaggagaaatggaggttatcggtttgtttgcgtggtctcttactgcaagcgcaaagtaaatctgcattcataatcgcatctatacttcatggtatcacatatttgaagctacgtagatcactggataattgatctggctaaaatattcaaaaaatggcatcaccaccagcattcaacgccactcctgatagaatcaacaccataactcaagccatacccaaaccaacctgttcctttctctcctgccacacattcttacccgagcacgagcaaaccatcttatcattatcccacacacctgcactgcgcgcaataacaccaacaagggtattctcatcctcgcgcttgaaaggaccctgcgtccccttggaaaccaccatacttcggccaataagctcccagattgccacaggccggtccaagaacacactaccccggcccttattgtcaacatccacggtaccgagaatgccccggcactccttggccggggcgacagtagcatcagcgccaagcattttggtcttcagagactcccagataccacccgtagactcggcaccgcgggagatatctcccgcttctcggatagttgtccagtatttgcccggcgcgaggccgttgattgtcaggtcgatgagggtcatgttcggggagacctggaccatgcgcgcgagtccgcggatattgttggagacggtcgttgagtgtgtttcgaggatacatacggcggaacctgtttggtaatttgtatcaattgaggttgctcatttatgtcgcatgggatagtaagtagacaccggggattccatactgttggtagtaccgctaccacggaggatggcatcgcggccggtgctctcaatcgcgcttacgatggagctgggaggggcggtgccttcgatgaagactagctggtctttaaggtttgcttcaactttattgattcctgccgcggggtcagtttgcgtgaaggtttagatgctcgcgtgagatgactaccttccaggctatttagagagctggatatagaattcacgcagccttcacaggtcattgggaccgagaaggtcgtctagacataggaaccgcattagtactggctgtttgtgagtcatgtcgctcagacaaggctgacctggaatggttcaatcatggcggggaagagagtatgtgcacaattaaaagcgaaggatctaaagcaagatagagagaaagataatcttccagaagagaaagatcagaaggagactaaatatcagaagaaagatgtgcaatgcgctatacaaactcaaggcggggcgttggatttcaaatcgaaggaactcggcttctgacaaaacgtcattcccgaaccttctcccttcaacattccctcacgcaaaatgtcatcccgatgggcaaatgacgatccagaaacagaagcaattgtcgcagagcaaaaacgcgtcaaggaacaaaaaaaacgcgctaaagcagagaaacaacgactagaagaggccaaaaaagctcaagcgcgcgatgccaacgccaatggcgagctaggccccccaacaaagcgacgaagactctccaacgacccagacgctcattcagatgatgccgaattgctgaagatcgagaaggaacagaaaagccagtcgactctactacgctttccggttggagaatgggggccctgcagacatgtggataacttcgaaagactgaaccacattgaggagggctcgtatggatgggtctcacgcgcaagggacatttcgacaggagaaattgtcgcgctgaagaagctcaagctggagaactcgccggacggattcccagtcactgggctccgggaaatccaaacccttctggaggcgcgacatcaaaatgtcgtttacctgcgggaagtagtaatgggcaataaaatggacgagtgagttctccgtggttgacactgtattgtctatatatgctaatcaattggttccgacagtgtattcctagtgatggatttccacgaacacgacctcaaagccttactcgacgagatgcgcgagcccttccttccttcagagatcaaaaccgtcctgctgcaggtgattggaggactcgaattcctacattcacagtggatcatgcaccgcgacctcaagacctccaacctattaatgaacaaccgtggcgagctgaaaatcgccgattttggcatggcccgctacttcggcgatccacctcctaagctgacacagctcgttgtgaccctctggtaccgagcgccggagctgctcctcggcgcggacaaatacggcacggagatcgacatgtggagcattggctgtatcttcggcgagctgctcaccaaagagcctctcttacagggcaagaatgaagtcgaccaggtgtccaagatcttcgccttgaccggaccaccgaactcagaaacatggcctggatttcgtctattgcccaacgccaagtccctgcggttcccctcgacatcggcaccttcttcagccggtaacccgcctctgctgcctcgttcccgattcccctatctgaccaatgcgggtttgagtctcatgtccggattgctggcgctgaatccagcctcccgtcctacggcaaaacagtgcctcgatcacaaatatttcaaggaagatccgcgcccaaaaccgcgagagatgttccctacatttccatccaaggctggtatggagaaacggaggcgtcatcacacgcctgaggcccctaaacgagggcaggaagcacccgagctggactttgcaggtgtctttggaggtgctccgggtggagataccggcgaagtaggggctggatttagtcttcggttgggataattgcttttttcaacatgaaagtaaataataacagattttgtttgattgtatttcaatctatattgtataataaagtctaccttgaagatatcttctggcttagtactgggtgtccctttaatatttaatcaagtagaacctttgccaatatatttgaaaaacatctagcataaaaatgacacagaaatataaaacagtctcagggccaatggctaactatagaaatgtggctatgtataactacggagtaatcaaggaggtaaacgcgcttgatagttcggctccaaagctgatcagctccgagcttctttttttttcctccaacctctcaacgtctggattcatttccttccatacttttatttattgatttatctaatattatttttacgatggcaaccgaacagcccatctcgtttgacgccatcattcaggctggtaattactcccttgccatctgacatctcgcagaatctgacccgtttttgtccacagatcgtcagaagaagaagcaggaggacctcgcaaacaaactcttgggaaagaaccgcagatcaagcgcgccaggctcaggttcgggcgctggcaagaaagtgcagaataaatcacagaatacaaagcctggaagcctagcaagcagggtcggagtaaccaaggtatgaccatggatgcgaccacatttgaagaacactctttgacaatttctcgcattaaaatttagcgctctgcatcagcgaccgtgcaacccaacaagaacaagcctgcgcccaccacgaacaacaatcggacacacggcaaacctggcaagaatgatcgcgtgaatgcggatcaggcccgggcagctttgcaatcccagaacggccaaatgaacacacgatcgggcaacgtcgcgcagaatagccgtccactcggtggcagcaacatgactattaagggtgcttcgggtccgttctttgtcgtcgggaggaactttgcgccggggacaacagcggccgacatccagtctgctcttgagcccataacaggtcccatgctcagctgccagataatagcaagccagccaagtgttactgcggcatttgcatatgcagataagacggccgcagagctagttgtggccaacttccacaaccagagggtaaatgccattcccgtttgatgatatcgcgagatggatgctgacataggctctctaggctgacgggagactgctcacaatgacccttaaatcgacgaagcccgcaacacagcaagaccccttcagtgcgctccgagcgcaagctgaccaggaacgaattcgagcccgtcgtggcccaagccatctgaacgacctcctatccgagaaccggggaaactcgccgactggcctctacagcgatgagatgatggtcgatgcgccggcgcggaatacccagaagaaccagaaccaacggagatggcgtcgttgaaacgcatggctagcgtttttggtaaggagtaaccactgcgcgaagtggtcgtggagatcgtgcttcttgcactctcatgaaatgtatgatatggtcacagcagtttatggacatttttttagcatctggagcagtgtgtttttgcatcagatagcggcgaacaggacaaaatcggacagaatattaatgttttattggctttttttcaacttctaggtcaatccgttcccattttatttattactgtcgctcctcgctacttgtttacacccccgagaggaaagaaaagaagtcaaactaaagaaccaagacaaatctgcaacaatgtcctggaacatcacttgttcagaaactccaaatataagagatatatgtatcccggtcatctcatgcccccaaggggcacaaggactagacgtgactgaagctcaatataaccaaaagaaaagacacaaaacggacagaacaggcaaaaaaaaaaaaggaaaaacacgagtataatcaagtaagacgagaatatatgaccaggaattgatctccagctccctatgtatggtcaaacattccttgaagaatgattgatcaaataggatcagtgcatggcggtattgcgtatgctggattgcaaagtggcacatttgccaatatttcggggaggtcggttcccacgtacatagcttcagagttattaggcacactcaaacaatatagcatatggtgtagccagagaccagatagccgcaaacccgtagaagcattgcggggcccacggcttatacaggctcgaatatcagtccatcgggggaggagtggctgatcattgtggaagatgttgacttgcaataccacattatctaccgggacctcaccagccgctgtacccattcttgttgtaccagtgacaggcagaccggcgccactcagtcgttcaatgtacagtctatcggactggtggatcttcattgctatagcaccagtatcctctataacattgaggtgtacggtatgttgccatgtgtttttttgccatgtgttaggatttcggatcgatacgatgaactgtttgatgttaacatagattctgaaatctcacttgggaggtcatacctcatgcatggcgtaccctctctggagcgggggcatgtagaagaacagatacatcggttctggtttgtagtcgtccatctataggtcaagttagtactgtatgcagaaggatatttctatatcctcatgttgggccgacttgatataacaagagatctacgtatgcatgaggaataggactcagagccgttatgtattcgaactcactccttctacccaaatacccgctgggccaagctgcctactaagagcgtaaaactcttccatttccatcttcttgggaccgccaaccatttttccgtgtgcccagtaagtgaccttctctttatcccagacaaggtgcccggaccggtaggcagccatgatggctatcacgttgggggtatttccattgtcatttcccaaatagttctaaggccattctgaccccttctgtaacctgcgaccgactaggctattgtatagggggttgtaaattggcaataattggtggaggtcggcggggtggtcatttcttggcacttatatatcatatcgccagtggaatccagaaggttggagtcttgagtcacttatttttttatcgtatatatatggagagctgtacatacaaagaacatttttctggtaaaaatcttgacctctaattacttcattcttgaggtccagcattgcggcggagagagtcgacccctgtaccgcgtagtctgttcgaggtaggattgatgcctggaatcgcctaatatctttcgcgatggtatcgacggagtgaacttgccttccgtctgtcattatttattgttatggccccactagccgacgcatttggtggtcttctagcttctggtattctgaagctagatagtgttggctctctctcgagctggcgaatgatcttcgcgattgaaggcattattactatctgcattggtattcttttatagagatatgatcagctccgagcctaggggtcttagctgggaagtcgttcaacgccttgattgtctgaagaaggtcaaaacaagctttgatgagttgccactctcccagcggagggttcgcaactgatcttcagctatttctgcttacactgccgcagaaagcaccaggcaatcccaccacttgttggcctaaatcgagtttgaaatgagaagtagatggagaaagctacagcgaccaagaagtatgagtattcaagagctataccgtcgtcacacacttgctacagcaagcggaccttaacccttataagtatttctatccttaggggaataaccggcataccaatataccgtgttgacccacattgctaggcgaaccagttagccagataaaccaagctgattttccaggcaatcaatctggagataacttactcatggcgtaaatagcaaatgcttctgcgtccttgtgcccttgtgtattgccgtttttgtcaaggccgtctgtccccttggcgattcgactcatacacgcaaggttcagcgaattctgggctgggctagtgcatttcacgtcaactggtatcatgtcagatatatctcaaggagagggagactcgaagagaaggaatgagaaggctcactcagcgtcttgcttcctccaccgacgaacgcctccgcgtgcgtcgactcgtggatcacggttgacacgaggaagtcggacagccactttataccccggccctcctttccaatgaagtcaggctgagccagcagtttctctatggcactcttctggttcgtagttgggctcgagccgatttcaacatgcaggtcgcggtagtgcagaccgctccctatccggctagtttcgacctcagtccatttgtcgaacttcaacgaacagaagaccatggtctcctgaactagaccataaatcgctccgtacacatacgccttgattcccggaagcgcgggcacggggccgaagcgtgtctgatcggccccgtcctgtagtgcacagatagcttggtatggcacccagatgccttctttattcggtgtacctttcgtttgaaagatccaatagacgtatgtcccaccttttgcgagagaggctatatatttgaggcataattagcaagggttgaaggtgcgggtttttacctcaccctcggatcgatggacgggtagatggatggcccttacggtttgtcttcccggtagctgatcaacatgtcagcagttaggatcggggatccagaaatccagggagggatcatcaccttcagtgtatgtcaaacccgcgctgtctctctcggagtacacatcggcgtcattgcagtagatattgatatacgggaatccaccccgaatccaacggacgggccgacctgcaaggtaatttgcgtattgcgattgtattgttctggccatgtctctcgttcccttgagcttttctaggccgttcttgtttcgaggatcgtcagggccaaagtagtgctttgtgataaacatgacgtaggaagcgaacgcattgtgttcgtcaaaagtacgctgcgctctagtcgccttgctagccttgaggtttccggagccgtcctcgttgtagaggctgatggctagctctagatgggctaccatgttggatatctgccgctatgtatcagcatcatagcagtagggccaggatttgggtaacacttacgatagcgctagcatcttggatcgcctgggcgagggttcctgagaagtcggaattgctgcaaccgaagaaaacttcccgcttctcgatagacctactggataatagggttgcggatgtttcattaaaggagacttccttctccagagccagtgctgccagtgcggcagaaaatataccagcccataaagcaagccacccagagagggagatgagattcatgccgacgatgatttacttcgtagtggcttccagagagccttaggtgatgcaacactcgtacggcacatgcaaggtacctttagaactttctaaggacaagttgaacgggtccccgctgaattaacagaatgaaaataggcagatacttacctccaacgaagaaataattttcaggagtgcgggaaaactattcgaatatttcaacattacgatatctaacctcggcctcatgatgtctctgcgtggtagcattctccttcacgcgcgacctgaactgcgcaccaggtagaacaaaaaacaaacatttgttcggccttgcagcgtgggaggctagctgggaggccgagcttgatgcaacaccaactataactagtatagatctactgaaatgagagcagtcaggcgtccagtgatgcaatctacgtaagactactattatgcaaaggagggggtcgttacattccgacggagcggtgatatttgagattatgttgtacgcgaattatgcttatcctttctagttctagtgaaagagagaacaattttccattcaagagtgtctgtatagggaaatcgatcatcagagctgacctctcagatgatcgacatctatgctccaaatttaaggctcgcagtcttatccaaagagcgtatgtcagcactaatgcagtagcattgtagggtgtcatgggcgcctgttcagctgcaggggtcaagggcagagcggtcctgatatcacacggagccgacaaacaaatgcttgtttatcgagcttcgctacatagacatgtcgatgctcccttcgtttttcccccacccttctcctccaacgcatggcaactgccttccagttgcactgtttcccctgtcctatctttttgtcttgaaaatccaagatgccgtggacgattctttggacggcggtagcaccggtcctctgcgtattactatcactcggcacaccggcctcggctttgagtacccactctgaacgcctagctgcagctctgaatgccccgggtgcgttccagtcgcagctcaaaccatgtccagcgccgtgtgctagccacgagccccagcactggactgtctatgcttcctttgaccggctctccttctgccatgagccaattcttttcgatatcgccattcacactcctgtgaatgactcttctaagacgctaaagtttcgcgcctgcaccacaggtgatggctgggatgagtccaggaatgccggtacaattagtggaacggtctatgcgggcccctccgttcgggagtccaaggtgacgctacaggttgcacaacagaaatctgcaggagcagctgaaggcaccagtgaggatgtaatcaccgtgctcacgcaggttcaggcatacctccacgcagggatggactgcaccaagaatattatgctgggttactacaagggggtggttgtcggcgtgtatgccggccaggcattgggtaaagctacagcttcatctgtgatgggccaggtcctctccaagttcaagggagcggctcccgcgaccacgcttacacagctgtgcgatgatcagcgtgacgcagaccatgtctttggtattgccacttcaaccgtagcggacctttctgctgtacaggccgcactggtatcatggagtcaagggaaatgtgagagcggactcggcgacgcgacctcactcccgaatgtcagtatctgggaggtaccgcaacatccagtcggaaggaacaataccacaacttcagatcctaccggtcaggaacttgatgcgcccctcctcgctcgcacagccaaatactgcaaaaaaaggacggttgtctcgggtgacatctgccagtctctagccaaggcgtgcggtatcaccctcgaccagttctacaagtacaactccaaggaaatgtgttcgaacctgaagattggctcgagtgtctgctgcaccgacgggttcctgaagccacagccttacgataacggcacctgctatacatacacgacacagaccggtgatacatgctacgatatcggccttgcctggagtctgacggccaaagaccttgggaaatttaacgatggcaccacatggggctggaacggctgcgacaacctgggtcacagtcagaacatatgtctcagctcggggcaccccccgatcccggccgttctgcccaacgctatctgtgggccgcaagtgcccggcacgatcttggacagccctatcaccaacgcctcggaatttgccttgctgaacccgtgcccactgaactcgtgctgcaacatctggggccagtgcgggattgactcaagcttttgcaccctgtccaccggccccacgcggaatccgggcacatcgaagccgggaatatacggctgcatctcgaactgtggtaccggcattgttaataatcatgacggtccttcgggtggctaccagcgcgtgggctactatgaggcgttcaactgggaccgtaaatgtctgcacatgcgtgcacagtggtccaacacacttgactacacccacatgcactgggcgtttggttctattggtgaggacctgtctgtatacgttaatgactcgcacagccagtggtccggctttatggatctgaaagacgtaaagaagatagtttcctttgggggatggggtttctcgacggatgtgtcaacctacgacatccttcgcaaagccatggcccctgacaatcgccacaagttcatttccaacctcgttgcctttgccaatagaacgggtatagacggaatcgacattgactgggagtatcctggggtattgataaccttttattttgccctttcggtggtacgcaagctgctgacagtaggtcttgtctcatctaggcgcctgatatccccggaatcccccctggcctcaatacagatgctcccaactacctagcgacgctcaaggcactacgacaggagctaccagacaaatattccatttccattgccgctccagcttcatactggtatctcaaagcgttccccattagcgatattgcgaaaattgtcgactacattgtttacatggcttacgatctacatggtcccacccccctcccttcccccttcccaataccttagaggtagtctactaacatttgacattgatctccaggccagtgggattatggcaacatgtacacgcagtcaggatgcaaaagtggcaactgtcttcgcagtcatgttaatcagactgaagtgcttctggcacttgctatgagtaagaatctggcccccttgttcatcggcacatgtaattctagttgaagaaagttttactgatgtgcccatcggtcaacagttaccaaagcaggtgtgcattctaacaagataatggtgggtgagtcgagttacggaagatccttcaagatggccaaacagggttgcacaggaccagactgctttttcactggcacaaatgagacctccaatgcgaagccaggtcgatgcaccggtaccgggggctatatctcgaacgcggaaatcaaggagattatttcgcatggcggtgaatcggtcaagacctggtacgacaaggacacggcctctgactacgtagtctatgagagtgagtatcttatttttccgacctctgccatcatccgcactcagcatcattcgtcaaggagaccttatacttatggattgagatacgcagatgatcaatgggtagcttacatgagttataacaccaagcaggcgcgaagggacacatggaagaaacttaatttcctggggacgattgactgggcggttgatctccaagacttcaatgtggctgacaccgtcggtcctacgggagactacaacaagtcgtcgtgcatcaatgtcttcgacaacatgatctggaactgggtcaacccggtcattgatgcccccgtcgggtgcacaaatcttatccaagcgtccccattggcgacaacggtgacccgcacggcatacaccacgatcacgctggtgtccgggggcaccgtcagcactaccattgtgtctactgccttcctcgtttctgaggtcgattaccagccgtttacgatcgcctcctcggatacggagaatgggaccatcatcacatacaatcccatcccgcgtgtgacgccgagccccatggggattcaggtgccgaaagggtgggcgatcacttcgcccgacggcgaggtggatggtccgtccaccaccacagacttggttggtcttcccaccaccaccaccaccaccaccaccgatgcaggagggttcatagtctacattacatggcagcccacggtaagctacagcctgccatcattcgtcacacccaaaatccctgcacccaccatccctgacgacgacaactctcccacccccatacctgatccaggagtaaccgactgtatcggtgatgcctgcactaaggggcctgattgcaccgacagcgactgtacacgcggtggagactgtaccggccccggctgtacccgcggcggcgactgcaccggtccaaagtgcgtccggggcggagtatgtacaggccacaactgcgaggaagggggtcgctgctcaagcgatcactgcgtcttgggtggtgggtgctcgggtgccaaatgcaacaaggggggcggatgctcaggtgccaaatgcaacaagggtggcggctgtgtgaaaaccttactgaataattgcagcccgggaccctgcgtcggtccgtcttgcattgatatgagctgtccgtggtgcgacaacggtattaccatcacggttcagcctggggggaatcctgcgcctacacccaggcctacctgtctgaacaactgcccgacattaccttcctgcgcgggcggcgccacatcgtgcaacgagccgtgcaacatcaatcgctgccccgcgaacagcatgccgaccggaaaggcctgcacgagcttcaccactgccagtgactgcacggtaattatcagcagcacggcagtccataccaccccgacgaggagcttctcgaccaccacgcgaactcgttgcgagacggtgatcgactgcgacgtgcaagatatgacagtcacaaccaccatcaccaccagcgaggtcccggacgcaattgcctccccaacggggatatacgactacgagaacgactctcactataatcaggctgtgtttgcagctgttgcatccgactacgatgagtgggaaaggaccgcagacaccaccacgaccacgaccacgactacgacaaccagtagcacacctacgactaccacttcaacctcaagtcctaaccctaactacccgaatgagttcatgatattgaagtacgaggttcacacggtatactttgatttgagtgagaagcactcctactcttggtccggtgactactacgcctacaatcaggattcgacaaccgagaacgtatgcaccaactcctaccgtgtaactggccctatcgacgcgggcgctagtgatgattatcctgcatcactgggtacttttgatctccctgcacagtacacgggctgcaagtactccggaagtaccgactctgtagggtcggttacatgcggctcaaaaaccttctcgtgcagcaaattccaagattatgacgggaaaaccgccacgtttgattgcggtaagactacagccgatggtggtagtacatatatataccattactactatgaggcgatccagtgtgccatcacttactaaatgatccccccggcgttgtgatatcaaagaggataggggaattctacaataaaagaacaattataactatttgcgttattatatgtgtttttcaaggctcaaagcagatcttcctttaacatctccgagtttcagaagacaaagtttgaaattagcttacagtgtcaaaactagagctagaaagggccagcggctatataagcctaaaactcatgcttttccctttgcattttggacgatcagtctgcgctctgaataaagccgcacttcgtacccgcatcttaagagcctcccttcacgtggctttccctcttgctttcttttaaagctcagctacaggcgacgccctagaggatttctatggattacctggatgggacaaaatttcgggcccacttatctcggtgtacaatagataatactaattagctagtttgaggatagatagactcggcctcttgattgaatctgcctatgtatactattgctagtggctacagctagtactgtgcttattgatatagtctttagggcttggatttccgagccataccatcttaggactagcggccgataaccgtccgataaagatatgatcacgtgcagtggagcttccgcggagagattgagagaaacatctcgacttggcgcaaggcaatagaaggagtgtttggcccggtcattttgtttacctgccgcagacagttccattgttgtatatctgatgataagaacaattactgccccccaaacccgagccaagaatgaaccagaccacgaggcgcgtagcgtcgtacgtcctccgtagacctcgcaacccagtacttctgagatgcccagggagatggaactccacatttgaacagagagaatggtccacgccgctggcaaaaacattggccagtgtcatgagggtaaatatgcacttagctttaacctctctgctcttttgctgatcattgacaccgcaaattaggtcacaggtcccgtaccaatcgcggcgttcatgcgtcaggtattgacttccccagatggcggatattatacaactcgaggggagggcggaggtgtcttcggcaaaaatggtgatttcgtaacgtcgcccgagatctcgcaagtctttggagagttgatcggtatatggactatcgcggagtggatggcgcaggggcggacaaagagtggtgttcagctgatggaggttggtccaggaaaaggaactttgatggatgatatgctacgggtgggtagttgcacttatacctgtcttccttttataagaaagagctcattggactgaccacgatttctataaccaacagactttccgaaacttcaagagcttttcttcgagtgttgaagctatttaccttgtggaagctagtggaactctccgagaagtgcagaagcggttgctgtgcggcgagaaggctgtgatggaggagacagatatcggccatcggagtgtgtgcaagtacttcgatgtacccatcgtctgggtggaggatattcgtcttctaccgcatggtgagtgatgctttcaatccggttttacccttttgtctgatgctgaccaatgacatcggcgacacagaggaaggcaagacacccttcatcttcgcacatgaattcttcgacgcgcttccaattcacgcattcgaatctgttccaccatcaccagagaaccagattgccaacgagccaagaaagatcatgactcccactggcccagtagaactacataatccgcccaaacacgcaaacaccccgcaatggcgtgagctaatggtgacattaaatccaaaagccgtggaagagaacataaaaggagagcccgagtttcaattaaccaaagccaaagcttccacgccgtcatcgctagtgatcccggagatctcccagcgttaccgagcactcaagtcgcagccaggcgcgaccatcgagatcagccccgagagccgaatctatgctgcagactttgcgcgccggatcggtggtgactctgcttctgcgcttgctgctaaaaagacctctccctctagcccaccgccgtcatctcagaaaaagactccatctggcgcagccctgatcatggactacgggacattgtcaaccattcccatcaactcgctgcgcggaatcaaaagccacaagaaggtgccaccactctcggaaccggggcgtgtggatgtcagcgcggatgtggatttcacttcgctggctgaagcggccatcgaaggcagcgacggcgtcgaggttcacggtcctgttgaacagggtgatttcctcgcagccatgggtattgaggagcgcatgcagcagttgctccgtaaagtgcaagatgaagaacacaaaaagacactagagaccgcctggaagcgattggttgagaagagcggcggatcaatgggacagatctataaggtcatggccattatacctgaaaatggagggcagagacggcctgttggttttggaggcggcattcagatgtaaccggcaagtataatagacccaaagccatctcatgtacaataatcacatctttcatcaaatagaatcacatggactcgccgaacatacagaaacaatcaaacagagctcgtcggccccaatatcccagaataataaaaaaactaaaatgtaaccatcaatgcatctaagtggtatctctcatatcaagttcgttaagtctcatgaaaaaagcagatgcataaagcggccgtaaccccaccatcccaaaagggccaattcagtattcctcccagatatccgcagcataagccgcagtcagcttagtatcattgccatacttctgctgccattccacaaacccaccctcgagcacaaatacttgctgcttctggctctcttccgcaccaaacatgctctcgcgctctcgcagatagcgaagggcagcagaggggccacgctgctggctgagtgcacagtggaatacaaccatttccttgtctttgagagtgcggataagctctggcatgcgcacgtccagtgttaagctcgggacccaagttgatgagtggatatggccaccaacgtggtctgttccaactgtcaactgatagtctttgatttgactgtatggcaaaaaaatggttatttacctgagtctcggacgtcgacaatcgccaggctgcttggttcgccagttgagagcagtgtcgctagaacatcgcggcccatgcgggggagagttgcgattgagatggatgacattttttttgtcgaactctgtgaactgtatatataaagagagctattcgaagtgaaacgagggggatatggtaattttacaagattcccaagattgcaggtgtgatatttacgatctcgagaaaaatgactctaaagcacacgacacgtgacctataatttcctttccaatcgggagacaatgattttccgtcacgggaacttcgagcacctccgaccctgcgcgtctacctcgattaatctctccttcccaagcccaggagacagttcaatccacccccatagacctgctgccctgacacgagcgagtccaaccaaaatggacttccgcctcctagcccgcagcctccgcgccaggccaacaccatggctccaacagcagacccagcttcaccgcgtcgcctccctcgcgaacggagtgcgctacaattcctccgcctcatcaccaaccccacccttcaaacccacatctcccaccgaccagccaagcacggcccccgaggtggcgaagcaagcccaaaagccgacctccgagccaagcacagccgcccccagggccgcacagccagcccgcaaaccggtctccgacttcgacgacatcctcagcagactcgacctcagtaagccccgagaagcaagcagcgcccagcgtcggatcttctcagactcgctttccagggctgtcggcgaaggcgcacagagcagctaccgggcgcgctcgagagtgcctctcccttcacgcaaggtcgagctgaagctcgggccgacgcttggtcgacagattcaggttgagccggagcgtggtactgatctcggtgctgcgctgcgcaggcttcaggctactatctcgcagaatagcgttcggcatgatgctcacgaacagaagttccatgtgagaaagggtatggtgcgcaagcagaagaagatgttgcggtggaagaagctgttcaagttttcgttccagggcactgtgaagaagattcagcgtatgcaggcacagggttggtagttttatgctactccttttgctttgggcttttgtgctgcggcttgtctactcggcttgtatgtatatactgagaaggctggtgtgggtgatggactgagtgggcagagtggccttggcctgaaaattggtgttttcttttgttacttgtacaactattatctaggtacttgatttttctgttgaatttggctcttgcattagatatggaatgaatgcatcggatttgtttgactcgattacttgggtatagcatcattatatgtaaagcaccggctttttgctagtggtcaattctgcctctcaagttaggtacactgtacatgtcgtaagcgctacactatatgtacctagttcctcccagttctcaatattaatccctctttccagttggcaagacatatccacttccaagcccgttcccattgccattgccaatagtagggccggagtaaccaccatagccattgttcttccccccattgccaaaggtaacaccaggactcttcgctccacggacgggggtcgcacccaaaagcccatctccatgccaagcggatcgcccacgccaacgcccaccattgcgctcccagaaaagcgcaactaaagcgccaacagaggccgccataacaaagaacaccagcttggaaaagaaagacccagagctcttcccagacccagtcgccaaagccagccacgattccaaagcaggccgcaccggccacccaatactggcaccgccctccaaccatgcaacgtggaaagagaaggtaagcggctccccacgcacaaccttagtgccatgcccagcagtccacggctcgcgtgccgcctgagcaagggcaacaggctcctcgtcctcgtcgagcttggcattcttgccggtgttgtcgaactcgggagtcgagtatgcaacaccgccaaccacgaagccaggctgcagagactgaccaccgcgagttttggtgttttgttctgcagccgcgtccgaggccatgttgtgcattacgacgttcatatccgtccagatgtgcaaatggctcagttggagtgtgccctgcagcgcgattgtgagaggcgtgaagggtggcccgttgtcggctagtgcggagagggtgtctgcttcgcctgacttctggtccgagtctttgtccgcgtgctctgcgctggtggatggtgtcagcggcgctgttggcacgcggcagctcattggtacatccgaatggacgtagaactcgaggaggtggtacatctcatcggagagggagtcgatggtgcatgttattgtttcagatatgccgtagtggagagagagagggcgggcggtttcgttgcaggtcacgaaggggacgtattggagtttgccgagattgtcagtgacctggatgttttcgtagttgctattagctttgtgtttcctggtagtctgcgctattgtcttcgtgtcaggagacggtaggcagactggtggcgcttacatgttctccttccctgcaggtgtagaacgagcaatggttagccgtactctacagcttgattgaagagtggtctcacatggttcgattcagacatgacactgggatatcctctctcaatttgtatccgtcgctgttgtcattggtgctccccgcaagtgcgttggttggccacaatgcgcctgtcaaagacagcagcgctactgctgcggaagacgggctcaattgacgtaaaagagacattgttgcttttttctccaatgatttaaggagaaaaaccgccccgcgtcggcaagtttcagtgttcgaggattgcgcaggagtgaaggacggaggtgtacccgcgttgcggagttgcggacaacaaagcgggtttccctacgatttccccttgctgctacttccaaccacctccctacttctaattctttcatatctaacaccgaacgtgtttcgcattccattcgaaagcttacttggtaacggaatttttgggaatcattcatttcttttcaaaggaaaaatatgtggaaaatcgttgctcgtcaaaactacacatcccacagtgcttcatgaaagactaaaacactctaagacagcttggccttctgcttgaaagcaagcaacagaccactggtggagctgtcgtggtcagcaccctcgcccttggtctcgagctccctctggatgttcttcgcaagggccttgcccaactcgacaccccactggtcgaacgagttgatgttccaaatggcaccctcggtgaaggtgacgtgctcgtagtaagtgatcagagcacccagggtagagggagtaatcttctgagccaaaatagaggtggtgggacggttacccaggaaagtcttgtgagcaacaagctcctcggcagtgccctcggccttgacctgagcaggggtctttccaaccatcagagcctcggattgagcgaggaagttagcagccagcatacgctggtgcttgccaccctcgacggggttgtgcgactcagccgccatcaagaaatcggccgggatgagcttggtgccttggtgcagaagctggaagaagctgtgctgcgcgttggtggcaggctcaccgaacaagataggtccagtggtatacttgacgtattcaccggtgcgagtgatggcctttccgttgctctccatggacagctgctgcaggtaggcggggaagcggtgcaggtactggtcgaagggagcgaccaggtgggtttgagcaccgaagaagtcgctgtaccaaacgctcagcagaccaccgagaacgggaatgttcttctcgagcggtgtttcccggaagtgcttgtccatggcctgggcaccagccaggaactggtggaagttgtcgtaaccgatgtacagagcgacagacaagccaatggcactccatacggagtaacgtccgcccacccacgactcgaatccgaacatgttcttggcatcaatgccaaacttggtgacctcgggctcgttggtcgacagagccacgaagtgcttagcaatgtgtgaatcatccttggcagactcgaggaaccaagccttggcagtgttggaattggtaatggtctctgcggtagtgaaggtcttggaggcaatcaggaaaagggtggtctccgggtcagagtgcttgagcgcttcagcgatgtgtgtgccgtcgatgttggagacgaagtggagcttaatgtcggggtggccgtaaggcttgagagcctcggtgaccattacagggccgctaggtgcagatgtcagctacaattcctgcttaaccaaggacgagaaagcttacagatcggaaccaccgataccaatgttgacgatggtgttgatcctcttgccggtgtaacccttccactcgccgctgcggacctgctcggagaactccttcatgtgctccagcacggagttgacctcctcgacgacgctctttccgtcgacctgcatgggctcattggcaacattgcgcagagcagcgtggtagacagcacggtcctcggtgaagttgatgtgatcaccacggaacatggcatcacggagctcctcgacattggcctccttagcgagttggaccagaagagaaacagtctcctgggtaaggaagttcttggagaaatcgaagaggatctctgtgttgtctacggtgttggtgaacttatggctgaagttctggaaacgctttgggtccttctggaactgatccttaagaactaggttacgtcccaaggtggtgtggtgctcctggagctccttccaggcgggaaggtcgctggtctgcgaaaagccgggcatgatgacgatgaggggttctatagacaagagggtcagtgcggggcaagtgaaatatgaaggtaatgtccaagtatgtcaggtttatgatatagaatgaaacttataaacatacattgaaagtagagtggatgatagagaggaatgaagaaaccaaggaaaggcaggaaaactaatggcgtcagtcgcatccggcgcgttggggtccgagggggtcgtggggcaacatcatcattaccgcattcggctgttatttcacttgttttctttattaaagaggttttggttgtttgacttgtttttatctagtttgctgctggaattattcttcttagtactgctattatccttctcattggagcctttcacctaaaacctctccttttgttctccgcaggtactgaaaatgtatacggagtacccggtataccaattcggacacctgtaatttcgtactccataggctattgcttttactcttctgggaccaattcgattccagcgcgtttaattgtatagccgggcattggaaattgaacggctatagcttttttgtagctaaaacagtcctattctcaaggaaactaatgtgttactcttgataagatgatactagttactactgcaagtctactccgtatactccgtatgcattgcaatataccttccaaccctccaagggccggatgcatgggaatttccaatgctctctgtattgttttgagggctaatagaacctgttcatagaggatatgcaaaaagtactcctacaagacataacatgaatagattcgctggacggctaaacatggaacgtgcacgggccaatagaaaattcaccgcccatgtcaccgcccgagcttttttgttggcagctgatagttatcggtttgaattgcgccttgatcaacctcactttcttacaggtgatacgactggcttgcatcatgtacaatccttaccaaggtgagtgctatcttctctttgaccttgataaaggtcttgatgcttcggaaaacctaaaactaactcttacctagctccgggtctttatggacgcgcgcctgactacggtgcctatggtgcgcctccgggcatgggtgagttcactcctttcgcgcattaatgttattaacaatatatactgaccagtctcagcccctcctccaggaatggctgctccaggcactgctgcccccctcggcatgcagcaagcaaatatccagcctggtcgtccaggaagcttcccgcccaacttccaaccgcctatgaatatgccaaacatcaatttctctgcgccggtgattcgcttgggtacttcgggcccgaacaagcctgcagctcaggagaatggtcgcgaacggggacccgatgctcctgggcgccgcggtggtctggggtcgatgggaatggatacccagcgccatcatggtcgcgagaccatgatgcagctccagccacctacacgcgacgaggtcgtgcgcaccatttttatcggtgggattacagagggcgcaggcggtgatgatggcattgagcgcattctacgatctactggtatcttgcgtcgctggattcgcgcgacagatgctgatgacaaaccttgccggtttggctttgccgagtatgatgacccggagagtcttgagattgcggttgaaaccctgaaggacgtggaagtcccggtcaagatacaggtacccctcgccgaaggcgatgaggaacaaaaagtcgaaaagagcaagcttctagtgcgttaaaattccctccctatccgcaaatctgacttctaacttgtctactaggtcgtcgtcgacgaaggtaccctcacctacctagagcaattcgagtctagccgagccgaacaagaccccgaggaacgccaggcacgtttcaccgctgcgcgcaacaatctgaacaaagtcttgacaagcctcttccatcccacagccccgctgacaaaggaggagatatcggcccttgatcgggaaggcgacacggaaatgaaggacgccgagcctgcaaaggatggggaagtggtcactattcccatcaccattgaagatgagctggccgatatccccccagaaatgcgcgccaatgtggccaaggagatttcggctttccgtgaacgaagcacccgccgcgacatcgagcgtatgaaacgcgaggaagagatcgagtcaatggagcgtgcacgcaactctggctctcggatcaatcgacttgtttcgcccccggcatccgctcctagtggccctgctgccggtatcaacggtattcccttgggcccacgggatcgcaatgtgatgaacgcaccttctggtccgagggcattcggtgtgcagattcctaaggattatcagaagggagttgcttttgtcaatgccgatgccctcaacggtgacgacaactcggatgctagcgacgaggaaattgaacgccgccgacaggatcggctcaaggctgaacaagagaaggaattctcagacctggagcgccgctggcttggccgtgaacgcagccgaaccgcagccctggagcgagagaagaagcgtgaggatgaggaagacggaaagttgcaagctgcgcacgatgagatggaagcacgacttaacgcctggaacgatgatgtcgaggacacccggaaggcagtcgattactacgcagatcgcggtacctggctccggacccgtgcagccttccgttctcgtgaggcccatgttgacgatgccgatcgcgccgctgaggatcgcgaacgtgtgcaatccgccaagcagcaggagcaggctcgcggcatggccgacgacttcctcgctcgccaggccaaggagctcgagacacgtccccaggaggcaccgcgcgaaccccagcgcttcaagctctctcttggagctgccgcgcagaaggcccaggccgcaaccagccggcgcgcagtggccgatgtggaaggtctgctggaggacgaggaagagcctgagacaacaacccgtcggccactcattccgatcaaattcgactcggcggccgaagctgcaggtctcactgacgaagaacgtgctcaggcggcccgtcaactcgcagcagagattccggctgagaaggaaggcctgtggaactgggcaatcaagtgggaatttgtggacgatgctatcatcaccgaccaactcaagcctttcgttgagaagaagatcgtcgaatatcttggtgtacaggagcaaatgcttgtagatgtggtggaggaacatgtgcggaagcatggatcgccccaggagttggtggagcagctggcagaagtgagtatttaccccttggtcttcttcttgacacaatttactgacctcaatcccctatctataggcattggacgaagaggctgaagtcctcgttcgcaagctttggcgcatgatcattttctgttccgagagcgagaaacgaggcctgtccttgtaggttgcacatgaacgacaggtgtgcctgatgtttccgggcttcactgagatacgaaatacaacatgtacacaaaggaatagctagtggttgcatgtacaatgccaaattttttgaaatctcatactctgggggttttcaacaggatctggtctagtctgcaggtaaacaagctcccacgtagcttggggtaagtcacggagcagctccgagtatatatctgggctctgattggtggaatgacatattttcccggcatttacaattttccaccaataagatcgggtctgctgcaaatgactagggaggagagaggggtgcgggataaactggagatggcgcgggggaagattgttgctgtatatacggagtaggatctcgatgggcttttgtaatctcttctcggtgatattcttcgtctcttactcttccttgtgcatctttgagctgccaaaaaagggtagaaccgactttcgattctataccccggatatatacaccccgcatttcaggattaaccactgtgtttctctagcaccgacctgcgccagcaatatttcaagccattgacagaagtaaagcctatttctatcaccacaagtaatagccatccacaatggttaaaatcactggcttcaccacacgggacgtgaggttcccggtacgtcaatcttgcagttccatatacccaatgcactcaatactgacaagcccaccatagacctcgcttgataagaccgggtcagatgcgatgaacgcagcaggcgactactcttccgcctactgcatcatcaccacagactcagaacactccggacatggcatggtacgtcacaccatatcaccaactcacagcaatccaattaacccaacacctgcagaccttcacaatcggccgcggtaacgaaattgtctgcgcagcaatctccctgctcgccccaatggtcgttggcaaagatctagacgagttgaccacagactggggcaagacctggcggtacctcgtctccgacagccagctgcgctggatcggccccgaaaagggcgtgattcacctcgctctcggcgctgttgtcaatgcactctgggatctgtgggccaagaccctcggtaagcccgtttggcgtattgttgcggacatgacgcctgaggagttcgtgcgttgcattgatttccgctatatcactgatgccatcacacccgaagaggctatcagtctgctcaaggaggttgagtcggggaagcaggagcgtatcaaggaggcagaggctagccaggctgtccctgcttacactaccagtgccgggtggttgggatacagcaaggataagctgaaggtgttgttggatcagagtgttgagcagggatacaagcatttcaagcttaaggttggggccgatttggaagatgacaagacccgcttgcgtattgcacgggaagctattgggtatgataagggtaatattttgatggttgatgccaaccaggtacgctatcactaccgattccgtttcactttcgagtcagactgacactgggcacatgaataggtctggtccgtccccgaagcaatcacctggatgcaagagcttgcagagttcaagccctggttcatagaagagcccacctcccccgatgacattctcggccacgctgccatccgcaaggctctggccaacaccccctacggccccgtaggcgtcgccacaggcgagatgtgccagaaccgcgtgatcttcaagcagctgctgcaagccaatgccttgactgtcctgcagcccgacgcctgccgtgtcggtggtgtgaacgaggtcctggctattctcctgctggcacgcaagttcggcgtgcctatcgtgccgcactcgggtggtgtcggtctgccggagtacacacagcacctgagcacgatcgactatgttgtcgttaccgggaagaagagcgttctcgagtatgtggatcacctccatgagcacttcgtccacccatctaacgttaaggatggttactatgccaccccgttggagcctgggtacagtgtggagatgaaggctgaaagtatggatgcgtttgagtaccctggtcaggaagggaagagttggtggagatccgaggaggctaagagcattatttatgggcccagggttgtatagatttggtaatggcgagtgctgttgctctagacgatcatgtgtttatgtatatcatgttaatagctttcaaaaataggtttcaatatagtacatactcactcggttcagattggctgtggatatatatagagggctgtctccctagacatgttctcaggcgagacttgaagatagagcttgcgcaacttggtcaacagatgtggatccccaggatcaattcgactttttaagtaaatttgggatgactagcgcattgaagttagaatcccatgaaactatgatacatttattttacaggtcatcataagtgcctggatgaacggccagtggctcggttttagaaaatataagggaagcgccaagaacaaaagtccagaggctgtggatgttcaaatgctcatcggagtgaaggcgtagaacctatgtagtgcgggggtgagggtataatgagaagttagcatcatcgccagatcagcgccactgaataccgaaaagtttcaaggcgccagccacattaggcttctctgaggcttgctcgaggattatgcgagaatgccctttcacatccaacgcgagaagctggtactcaaatttgctcttatccaaaggtttcatcatgtgtacgatgaccacgccggagttgagaggaccctcgacctggaaatcacggttagtacactcatctgagattgaccggaaagggtatcatacatggaaatgcatgcgaaggtgctcacgacccaatcgatccttttcagctgatgatctagtcaattgtcagcatctcggctctctcgcattatgtacaaaccctagaacctacgcgagaggcttgttccgtgcccaccggctcgtggtctcctcgccatatgccttgatctctcttcggtcaccgagcaattttatacactcggggtcatctttaatgcgcgctaccgctgtttcaaattgcgccgtcttgctgtttggcgacaaaacctcgagatagaaaagtgtgaagactccgccctaaccagatcatagagtcagcaactattcgccaaagcctcgtgaatgaatgtagttcataccgtcagtactgctccagccaacacgataacgaagttgaaggattgctgtgttgcccgcgcaaccttctctcctcgactcaaatcgccccactgaactctcccatcgtcggacaagattgtaatgctttttttccttgaagaagtagtttgaggcccgctacctatgttgctctgcgtggcgtagagccgggcgatctgtgtctgtatgcggggagagggccggaggagaagatatgccggcgatagtccgggaagagtgcgcagctgaagagaattcattgtgaaggtcaaaaccgagcgtcctggaacaagttggagtatctgagtcgaataccggactcgaccgtcttccaaccccgaaaggttccaggttgctatcgatcttcataatcggcagcacgtgcttacaatacggtattacaatacgtcctatggcaatgaagttcccagccaaatgtgaggcgttgtatcgcgattacaccaggcacagggtcgacagagtccacgttcgccgttcccgacggacgctttgctctttgccttacctgctcacattctcgcccaaaccccctttttcttttctctttgactttcccattgatctcccctcggtacaatcatgagtgccacaaaggcgcagtctcaaaaaatctttgagaaggccaagttgaagcccgcgaacaaggtgcgcatacccccaccccgtactgtatgattgtggcactcgattctgatgtttttgcttttcaggtatgcttcgactgcggctctaagaacccgacatggtcttcggttccattcggtatctacttgtgtcttgattgttcggctcaccaccgtaatctcggtgtgcacatctcctttgtccgatcaacaaacctcgaccgtacgtactgccgcacaatttctacacatgccaagtattccggtggctcaacgctgacatttctatagagtggcaatgggagcaactacgggtgatgaaggtcggtggaaacgaatctgcgaccaagtatttccaatcgcacgggggttccgctgcgctggcgagcaaggacaccaaggtcaaatacacgtgcaatgcggctgtcaagtataaggaggaactcaaaaggcgcgctgcgctagatgcgcaacagtcagtggatctacacccggaactggcacgactacgtgctaactagtgttattgctatatttaggtaccccggcgaagtcatcatcacagatctccccgccggcaccccctcagatgactcgaacacccctgctggtgacggcgacgatgatttcttttcctcctgggacaagccctcgatcaagcgtccgagcaaccccccttcgcgcaccagtacgccccccgtcgtcagccggaacggatcccctttcctgaacgctggtgcaaacggaaacggagcccgctcgaaatctcccttgtctgcttcggaggaaaagagcgcttctcccgcgccggctgctatccggcacaccagcgttagtcggaagacctctacagctagctctgcaaagaagagtagtgtcctcggtgccaagaaggcacccaagctcggagctaagaaaattgccgccgcggatattattgatttcgacgaggcagagcgcaaggccaaggaagaggccgagcgtattgaaaagcttggctacgaccccgaggctgagcaggcggaagacgaggccaagaaggctgcaactgctgccgccgctgttccgatcgcctctcctgttccagtcagccctgctggcatgtccaatgaccgaaactccggtgatgtggggcgactaggcatgggtgtgagccgacttggctttggccaagtgtcgaagcccgttgcccccaagaagccaacatttggttctattggccctgctaagcccaatcccgctgatggtaaatttcctttccctcgttgattgtacgtcacatgaaagataagctgacactcgacacagaagcggaactcagccagaccaaaactcgatttggcactcagaagggtatctcgtccgatgaattcttcggacgggagcgattcgaccccgctgcccagtcggaggccaaggaacgtctccgccaattcgatagcgctacatccatttccagcaactcctacttcggccggcccgaggatgaggtcaattcgcttgacgatggctatggtgatatggaggttgctgctaaagacttcatccgccgctttggtatcacggctggagatgatcttgagaacctgtcgcatcttgtgggcgaaggtgcaactaagctacaaggtgagcaagtctctgtttgggcatggacccacgttttgctgactgaatatcgccaggtgctatccgcagctatttgaacaactaggctagctgcccatcaccggatattacgccttttatcactccaagtaccttagcaagcaacattgttccctatccccggttccgtcatcttcctacgcgacgtatattgtgtctcccctgtccatctcgccctttgacaatatttctttacttggaaaaacattgcgatcagcagtcggccaaaaacttgggtttcatatcattctggtttgcgatctggcgattattttgtcttctcccttgctttttcgcattcctacacagcaacatggaatgatcgaagggaccctttattttattttgctcatttcgttgatatggtttaggataaatggtttaggataatcgagaaattcatggtttgatattattgatagacaagaatttttgacaaaaagtcccgcaccgcccataactccatgatgaatgaagataacacagtaagtagtacatcacagtacaagtcacatccaagtgttgaatacaaaaaaggccctatatataaaaaagccgggcaaggctatacagtagcaagtacgacctcaatcaacgcgataaatcgcatcggcaaccttcgccacctgccacatctcatggacatcatgaacacgaacaatgtccgcgccaccagccacgctagcagagacagtagcagcggtaccccaaacgcgctcccgcggcgtcttgaccccagtaagatggccaataaatctcttccgactaggccccatcaaccaagggaagcactcgagccccggcatcgcccgcagcctaggcaggtcccgcaatatctccagatcatgctcctgaatcttcgcaaagccaagacccggatcgaggatgatgcgccagcgccggatccccgcgtcttcggcagccgcaatgcgcgcgcccagctcagcagctacttccgggataacgccggtcgggtactcgtgtagggtcgtcatcgtttgcggcgtaccgcgcatgtgcatcaggatcacggacttaccgatccgcgctactgttggtagcatttctgggtcgaggaggccggctgaaatgtcgttgatgatgtctgcgccggcggcgcaggcggcttctgctacgctggcgcggtaggtgtcgatgctgatggcgatgttggcggcttctggaatggcggttcggatgtgcttgattgctggcactacgcgggcgatctcttcggcggcgccgactggttttgagcctgggcgggtgctctcaccgccgatgtcgattattgttgcgccggaggcgatgaagttgcgtactgtttctgttatgtagtttaggtcggttggggagtgcttgccgccgtcggagaaggagtctggcgttagattgaggattgccatgacgtgggtgctgcgcttgggatccgttgcgcgcaaggatgggaatagtggtgagattggggttgtcgacattggtgttggatctggcggcgagagagccttcagatgggtgctgtatgtttgcgtgtcctttcctggtagtggagggtattcatttgggattaatctaaattcagatggttagttttgcttattgtgtcggtatagcatatataaagccattgggagcgtactggctaagaggtcgcaatacaaagtctcgctcaagcatcagattgtgtgggatgttgagacgctcatgacagacgatctcctcatcatatagtaggatatccagatcaatagagcgtggacctttgtcgatgagcttctttctgcccatcgcaatctcaatagattgaatagtgtccaaaagatccaaaggtgcaagggttgtttccacctgatagaaattaacaatgggctaccagtttggacattactttcgctaacatacctcgcatacaccattgatgaaggtatcttgatcaagcacatacatcggtgcggtttcgaacaatgaacttgtccttttcactttgataccaactcggtccatttcaagacaagcctgctcaatcatttctactcggtctccgacattgcttcctagggcaataaaagcccggtggatgtctggactgggaaacttcaaattcatcctggagtcaactgcttgcgcagtggataaattcctcacaggcggggtcaaatgcaacgacgttattgaacgtcgtgatagaccatttctagtgagaattcccgatgccaattgggctgtatataccgattgagattgagaagttgaccctattgaatattagtgttgcaataaagtagagacatggcaaataaaaaaaatttgcggggacaggcatatttccccattgggacgatacgccgataagcgtgcgaggggcttttaagaagtagctagccacatacccaggctctgcggtgagggttttctgttactataagatgtcgtcagattcgccacagttaattggttatttggggctttaccctgtatgcaacggtctatgaccactcctggccggacctgcagccaatggcgaaagtcttagcgacctcccaatttgccgtgtatgaggaagaagagatgccaatggaggggctctctggattaccctggcattcatgctgatttgaaaaggaacgtagcaatacaaataatgtaggcaagggctttgagtcaattctggtaagtttcacgtggttcgccttcttcttggcgttgacgccgtgacgctttgacgtctggatgccttggtgccttaatacctatacaacatttctgattctccgaagtagatagctagctaggtggctttcgtggcatatataatgcgaattacgctcattcctcaccgtgaacatcacccatgaatatcaattgatcgaaatatctagtttaagtcctgcttgatgatgtccgccgccttctcagcaaccgcatacacagtcgcctggatattacctctcggctccaaggggaaaatactagcatcgacaacgcggatattagccgagccgtacactttcaggtgggaatccacaacaccgccatcttcttgtggcatcatcgcacagctaccgctgacatggaacatagacaagacgagctctgtgcacagctcctttgctttctcaagatccgtcagaggctccggtgtgtggaggcgttcgccacctttcttcagtagcgatgtcattggctccgtctcagcaatcttatccatccacatactatgcctagcatgcaactccagatcaaccgggtgacggagagttccatgatcaatgagaggagcagccttggggtcagaagattggatatggacggaccctcgtgatagagggtagctaagcagagaaacaagagtaataaagaaacccgggtgcccgagaccgaaaagacgtttgggggattctccttcccggggcaaaagctggaatggcgctagaataaattgagcattaggttcgtcgggattctggagtagggtgcgtaatgcttcatattgcttcttgtgtgtccgcgagatgtcgggactgtctatcgaagcttgcagcttctgtagcaattgagtccgctcgtcttcgggggtatctacaagtggcatgaatgcagagaccaggggcaccatgccaaggggtccggagccatccttctgataagcggccatggcagcacccgcaacggcagggtcccgagccatgtcgcctgacggcataccgtctgcgacttcatatccgaacgagacaataccgtggtcttgcatgttctcaccaacaccggggttgttgattattgtcgggatcccgtaggactggaggaggctttcatctccaacaccagatagctcgagaatttgagaggattgggttgttccggcagcaagaatgacttctttcgcgactgacacggtgtacacgtttgagtctttgctaaacaagacaccagtagcaatggcatcaccaccgttgcttcccttctctatgacaatcttttcaacccaggctccagttacaacgcggagattcgaccgagcttgcacctccggccccagatatgcagctgcagaatgacttctggtgtgtgtggcgggatcaatagaaccggggttcacgaagggaccggtaccggcgccattgatcgggtcatcggcctgcgggtacccaagatttttgaaggtgtccatccatgccgcatggtaaggcatgtactgatctccaaatgagacttgaacaggacccgtgctaccttgatcctgctggtcatatttcatccccttgaagaactcacggttgtcatctgatgggggtgctgctgtatgaaacttgcgaatatatggggctaggccatcccatccccagccggggttgcccaatgtttcccaggcattcaacccggaacgagagggatagatgaccattcccatattgattgctgaggagcctcctaaagtgcgacctttgctgcctaagagcttacggccattgagttgttcctatgttacatggataaggctaatggcaaactttatggggattgagtgaataatagtgtacctggggacacgatcgaaaattccaatcaaagtcctcgtcttcaagtgtcgccggccctaagccgggaatgatgattcgagggtcattgagacggtttgttccggcttccaggacgaggacgcggatattgggattttcagtgagtcgattggcgaccacgaggccagcagtacctcctccaataatcacaaagtcataagatgcgttctcaagacctgccgaggactcggtgtcgaaagttgccatggtcagttatgtaatgtaagtgaagcaagatctgaatgagagaaatacatctagaaatgagatgtatttggggattgctcttaggaggggtagacggattggggggctctcaattgagtggcgtccaactgttttaccttcattggaaaaaaatgtatttcgtagtacgtacgtacatgtgacgctgatagctcaggggaagtaatgtgatgtattgtactatggacagcagctggttaaggtagctactacatggtcacgtacgcccacgtaagagcaacagtacaatacaatcaacgaagcccctgaatctcttgtcgaaatgcgccccaagctaacagaatccaaccaatctaatcggagacttatgttgtatcgtagcaacgggatgggccgcgctatgccgaacgggagcagtgcagaccgagctagagctagcctgcatgtgaaacagaggcattgtattgcaattgacgggatatatttgccaagcctcggtaagaagacaacatccctgtcctttcgggatgaaacgtgcggggatgaaaggctaggcctaggtagtgcatattttgctgaattttctccaccggccttgtccaaaatatcaaatctcggattggtatgaatgtgatatttgacacatatgtacggagtgtacctcacccatttcgatgaggtttttcttccccaacttccggccaaggctgggctcgggcgggggccggtgcgggctcgtctccactttcctcccgaacgggattggttccaccgagccgatacgctagccgaaaataggttagcgtgtgtattaggtccgggcataatttacagcgtatcactactaagccacaataaaaacggcctagagagggtcatctgttctattccttgtctgggggtacccagcagccctgtgggttagcgtaggttcgcgtatattgattaggaaagtggatcttgatattaaatatttcttactcctcattttctaaatcttctaaatcgccatgcgacgttgacggtccgagtaacggtatcaaactgaaaaggaaagccacaatgggaaactatggactaaaatcggaggatggcagggaggtcgtgattgtgatgctggtctttggggtgatttccctgagttccacgattcttcggatcgtgtcccggagaatgagaagcatcagcttaggcttggatgattatttcatgattagtgcgacggtacgctcatcaaacagcctttctagcgtggcgtgagactgatgaagcctgcagattttggtaatggcgtgtactgtggttgtaatattgagtatgaaacccgtcggggaatggaacaagagacagcgctaacgggtatctcacgcagtggtgacaaagggaggagttgggctgcatgcaaacatgagagatgtcgcctttccagacatagaattcaatctcaaggtatgtgaatcacaacccttccaaccggtggatgaagctcaccaccgcgcggaaaagatgattatcgtctgccagattctctacgcaattggcctcgcgcttgtcaaaacatcaatgatgattctctatcacaagctctttggcaccaaagccagcatgcggattgccatttatgtcaccggtactatcgtgtgggcgtggggactgagtatcatcctcgaatcctttcttatttgtcaccccgtcgcctttaattggaacccgacgctacctaaaggcggatgtggaaatcgtaatgcagcctttgtggtagccggagtactcaacatggtgaccgatctcatggtcatgttacttccaatcccatatatttggaagctccagctacccgtgggccggaagattggtttatcggtagcattttccataggactgttgtaagtggatccgcgactgtgctctgatcttgattgcacgttcaatggctaaccttttgaaccacagtgtcagcgcaatcagtatggtccgcgttgacagtctcatgcgcatcgatttcaacgatctcacatatacccttcccattccgttaatgtggagtatcatcgaacagcaactcgccctcgtcgcggccaacctgcctcttctccgtagcgtgttctccgccgtgcttcctggtagttggctgggctcatcagctcgcaggactgggacaccatcgggggagcccagtgcgaagaagcgctcggcgcaggaatattctctcacgcgcatggatgctggtactaatcgaagtgaggtcacggcagacagccacaaacatgcgaatcacaattcccagacgaggtggagtgacgatgatgagcaatcggatacagagttggctgcgaatgcgatgccacctgatgggatccagatatggaaggcttttcgagttgactcgaccagagagaatgttatttgatgataatgataccaatgacatgtccctcgccacgataaacacagtctaatcataatggccacgaatcatgacggttttggggctatcacaataatgccttttttggctcgaaacatgagccctttaattatgagggagatatccatgaatactctaccatataaatgaaatgtttttcagattctggtgtcctttcagcccagggcttgtctcgtgactaagcatgcacctaggcgcgtgcatagccgcccttataatcctgacacgacaatataccagaaaaaggagctggtaacagggatcgttgacattgagaaaaagcttatgaaaataccatttgcttctgttggcagtgtctatttcaaaacggatctccctccccattcgcagggccaactatatcagccaggcacatccgacgaggaccgagactctgagacctactgtatcggacccaatgccgattacatgttttggtatggaaaacgcgcaaattttgacttggataggggaccatgtatattttctgctggagcaacatgatacataacgccaagctgaatatctcatagggagtgacctacggcaatatcttcttgcaattgccaacaaagaaatcaagtggaccgagcaattcgggaagccgcttgaagcggctttccacataacaccgtttttccgggagtcaactcccaccgagattacttggtgctccttaggaagtacatcgcaatgaaagatccccgagatattttgaatcgacctacccttcgccatcctggtttgtatacaacccttcaatcatcagactgataaaagctaagtacaacaatagacctcactcccagcaatgtctctgtgtgccccgacacattcaaggtcacatgcgtcatcgactggcagcatacagttattatcccattactccttgctgccggctatccgaggctatttgagaacccttcccccgagccccaataggcttagtcccgccaaaatatccagacggctatgatatcatgagtcctaatgataaagctcaagtcgacgagctcatccggcgggaatctctcttctatttataccgagttttcaatggaggactaaacaaagtgcatctcagagctctacagaatcctttgattctatcacgtcagcatctagtggattttgtgggccggcaatggtcgggcaatctcatgaccttgcgaggagctttaatgcgcatgcgtgacatatggccctatgtcccggggaatgacgacaactttgaatgtcctactacattttcagagcaggaattgaagagcagaccgagagaaagtcaacgtgggacaacttgaacatgcttgttgatcattggcgtgatgaactaggggagtctcagaggaaggctgggtccggaatgaccagtacgactatgctaccaaacggaaccagtccctcaaagcaaaattttcagaagatggcagtgcagacgagcttgagaacatcaagtgaggctggccttttcaggaccacgagttctttcaatcatcgtcgcataatgcttttttcaggctttgtaggcgcctggcggtcaagataaatgctatatatggcaaaacattcctccgaaaaaaaaagctgaagtccatatttctgcatggcgtagccatgtggcacctggcgctaatctgctagacctaattggtggctagtatatctatcatcgcatgcaggatacagggctacatcaaaatctatcctcttcaccaatcggcctcatgatcgatccatcgttcgttaccgagacgcctgtagatcttcttcaatatggcgtgcggtgggaccatgaggtgttgtcacaaaagaggagggaacagagtaccacaaagaccagctgcagccgaatgccggcaaaatctatcctcaatcaagcttggaagcaatgacgtgacaagaacggcgggactcgtcaactaaagcattacttcgtgcgagaccaagaagccctccgagcccgcttaattgcgcgattaatcctgtttgaaaagcccgccgaatcataatacaacctacagcttttctcgagaaagaagtaagcgatttacgcgccgacgagaagtagaagcgaagcggacttggtcgactaagcaggtaacccacgaacacggcaccacgaggatgtggaatatgtagggctctagggcatagaagtgggacatgtttagatgaattaatctaatttgattaattaattaattgtactttagttgagataaacgcatttaaatccaatcagtcgggttgggtgtgcaggaaatacgttgactagctaagatcgagataaaaagggagcttaaacggtccaagacaactacaacatagatacgcatttcaacagccgacttatcttcagttagttttgtgttgtaaaacatccgattggcgtttcctcatcgtctcctcagttggcgcaatagctgccagagctgctcttcagcacgcaatcacagtctccggtgacatcttgatcttggcctatcgccaactagatttttcggccgatcaccgaggctatgtaattagttggagtctgctatataagtttctccaaatcctgtttgttgggtatacacaaatatgacagtcccccaacaacggcggaaatggtggaaggtgcaatggtttgcagaccaggacactccagaggagagacggctcattaccaaactcgacttgctgattgtcccttatgcgttcctcgcatactggactaaatacattgaccaggcaaacataagtaagaaatcctccgacgggatatcaagtatgttaggtcaattctgacaacaaccagataatgcctacgtctccggcctcaaagatgacctaggtctacacggaaatgagcttgtacagctgcaaacaatgtatactattggagcagtggtcggacaactgcccttcattttcctatttaccaagctcccaatgtcttggatgattccgtgtatggatgttatgtggggaatcttcacgttgttgcagtaccgggcgaactcttatgcagagatggcagcctatcgctttttcgtgggctggtttgaagtaagtatagagaggtctgattgactgaatgagagtactgacattagccaggcgggtttcttcccggcaatgcattacacttttggtaggcataacctaatctccttgtcagaagatccatcactaattgacaataggttcatggtatcgcggcgatgaaatcgcccgccgcggaggattcttttacgtcggcctgaccttcggcacattaacagcaagtctgattcaagcgggcgcctcaactcgactggacggcgtcaatggactcgccgggtggcgatggatgtacattatctgcgcaatcatcaccctcccaatcgcaattctcggctacttcgtcctccccggatcacccgacaggccgaacaaattggtgttgaaagaaaaagatgtacagatagccaaagcccgactggcacgagtggcgcacgagacaaaagaaagcagtctctcttggcggtcggtactaagggtcgccagcaactggaagttctgggctctacttttactggatgtgcttttctggaatgggtctataaataccactgccggtggataccagctgtggctcaagagcctggaccgataccctaccggccgcttgaatgagctagctgctatttcccctggcttgggtatcttttacacgctcttcatttgcttctcgtcggatctattctttggacctgcttgggcgattacagtgtcccatatatggaacattatcggactgatcattcttgttgtctgggacgtctctgagtcgacgctatggttcgcgttcctgactacttactctgctgtcgccatgtcgagcgttctttacggttgggttaacagtcagctacgagcttctccggttgaacgcgccctaactctcatcatcatcaataccgtctcccagtcaaccacagcatggactcctcttttagttttcaagaccgttgaggcgccgcgattcaccaagggatactcatttgtcctcggaaatgccatctgcttgattttgctcgcccatgtgatccaattctttatttcacgagaagagtaagtcatccccctaaccaccaagtcaaggatctctaataaatttgttacaggaagcttaaatcgagtcgggggagcgtatccggttcagaaagcgcagatgtttcgagctatctcgaggccaatgttcaaagcgagggtgtacaggggaaagttgatacacagtcataatgcagcacttgatagcattcataaatagactttaggtaaacattacgttggaactatacaacttgattagatcactgtcatgaaaactccctgccattggcgtaaaaccagacatgattttctgtataataacagtacgggataaacacaagtcggctgtaaaacgcatgaaacaagatattaaacgacatcataagaaacccaccgcagaattctcattctcataaaaattgggttgatttacgtctcgtttgcagaagtcgatgttgtgctttatgcgtcctaattaacatacgcaactaaacatagtggtgtgccactggtgtcattcaaaagctgataaatgccaagagatatttaacccacagttctacctgaggcaccaattatatgcaaaccttgcaaacttttcaggggactttttttcaaggtcacgtgtaccccatctgtaatttctaaagccattgatccaactccgagctacaccttatctcgtgtcaccgctgggtttattgccattcctaaatcctcgacgtttacgactctcacgcctttcgcatctgatctcgtcccggtgatccgccttttcttcccaactttccgcccgtccgcctcattcacacatcatggatcacacacgcgatccctgtccctgggttgccctgagcgatttcggaggtgccttcgccatgggtgccatcggtggtgctgtctggcacggtgttaagggattccgcaatagtccgtacggcgagcgccggataggtgcgctctcagcaatcaaagcgcgcgctcccgtcctcggtggtaacttcggctgctggggaggtctcttcagtatttacgactgttcaattaagggtatccgcaagaaggaagatccctataatgcaatcattgctggtttctttaccggtggctccctcgccatccgtggtggtttcaaggccgcccgaaactccgctattatgtgtgccgtcttcctcgctgtcatcgagggtgtcggtattggtttccagcgcatgatggccgataacacgaagctcgaggtatgtggaatcttatcgccttcgattgtgcaattagacgtgtctgctaaccatgaaaattattagcttcctcccatgcctccgtcggagcagaaggccctcgcttgaataccctcctctcggtccatatcttccttcgatcgtcgtcaaaatatcctcctttctacccctgtcttcataaacatcaagtctctcttctcaggcgttcggtcgatgtcattattcctatacaacatagcacagaggctcccgtttggttcctactttccccctcgcttttaatgccgctttctacggcttgtgtcgaagcattgtacattaaacatggcgaattcattctcatggatggttttaagaccggtgcatgtcttttcatggcagcgtgcttaaaccacaagattcataacatttgttttcttcttcctttagataatttgtgaaatagacgaccaaagccgcgtatcgtacgggatcctgctaataactcgtggactgaaagtgtcacagatagcaattcagagtctacatcgggcagctttcaatcgctacgatgtaaatcggatgccgactgtatagcctatgggcctttctcgacgatccgtctgcctttacccttaggaaaccctcacataaggtcacacttgcccgagcaaactaaggaccttcattgagactattactgtggacatacaagatatttcatagtatgtatatctttttcttttttttttttttttgtatatatacacgccagcggccttccagagcttgccccagaccccactatccgcaccccaacaagacgcgatggccacttcgcacctttctactacgtatctaaaatccctaacacgccaacattctgccttacccgcgatgacaacaccagtcgccctaacacaaccaatccccggggaccgagatgactatatctatgtctacttcgggtgtaacattatactacgggacgcaactcgttatttcgataggattgcatatataggtccagggcgctgggtcggatgccaatatgcggtagacggcggatttcttataaacacataacatgccgaatgtcataataataaaagatatacggagtcgccggatgtacggcaaggttaacagaagcaaagaatgaaaaggaaatagtaaattaggattcaatagttataccataagaagtagtactctcatactttcgtcccgtctcattggtctaacaccctattcgctccactatccgcacctaagtacatcctccatggagccagtcagctttgcagtcggaattaagggttagtaggtctttctagtacttgcttgaggccgttgaaatgttcgacccgtggagtgactacgattcccaatttcgttctctgttagtcatctaaagcccaaaatcttcgactcacatagcgggtttagctgcatggaagatggcaaactctcatatacaaacgacctataggagatattctccgaaaggaaaatcgaaagcacttggagtaggtttggggtcatccctagttattggactttccaactggatgtgctaaggtcctccaggatccaaatcaatcatatgtgcgggagtcattgaccatatttctccaattcggtgcatattccttttcagatctttgccactgcttttgagccgagccggatgattacacaggagaatcagccagacgttggaggttcaagacgaggcttaccaagaagccagaggtatgatgtagattctgttataccgtaccttgaattttgtgtgtgttcctgtgatcaagtgctcttgaagaggcaacgaaaagtcaatttggtttttctttttccttttcttctttttttttcttcttttcttcttcttttccccttctaacgcagccagagaatgtgtattcctggttttggtagatttagccacaggtacatgctgccaaagagagggaaaccacaggcacattctgtgaggggtagaaccaggaaaggcaggagaggcgagagttaaacatatgatccgatatatccgagttgaccgaaggaggcgaagtactcaaccgcttgatactattgaacatgactcagcaagaatcacgcgctggctaataatttgtcgaatgacaagtcccacagaatatcgtggcaaaaagtgtggctgagttggtggattataggaacccacttggagccttgaatggatataatataggatttttggtttaaagtccgcgtgttgaactacaacatgtaagagtatcttaccgagaagttatttgaggtcttctatagtagatagcatccagaagacatattatgtataatgaacatttgaataatcggctgctttcggtaattttaccgtgcctaggaaatattgccacaggaagctgacgagaatgtaagtctatcaaactgccgggcagctgcgaaccacggtggacaatctcagaagccatgcgaactgatgtcagatccgttttttccctctctctggtgtgtttcggaagggcatcaaccttggaaagtgcaaggtggtcgaatttcgaaccaaacccgttgaatgcttggatcaatctgagtttaaagaatcgaaagctgacaaagtgttcgagacgcatgtggaagcctcagccgcatgctatgattggctaccggttctcggaagccaaccttattgatcgaaccccacatctatagaattgtagtctatccacactctatccacactcccaccttttggttcctcttggaaagttctcctcatccggagcgactccaccaagcaagcatagaaaagatggccctctgcagacatgatccccttttctttctttcttcaaacacattctttgatccttcaagtcactctcttcttgaagtcattcattctttcgaggttgatcctccattactgtcactttagtatctctgtaaatcaggtgaacttttgtcccacttccactccctcaatttacaatcttccatcatgactttcaacgtcttccttaccggccttctcgctgccaccgctgctgccgtccctctttccgctcgttccggagaatccggtgccgttcagacccgtgattctggcggcggcggccttcagatcgtgaacaacatgggcaaagatctctacctatggaccacctcgtccgatgctggctccatgcagaccatcagctctggaggtgaccacagcgaggactggaccacgaactccaacggcggcggtatctccatcaagttgtccaccagcgagaccaaggatagcgtccttcagttcgaatacacccagaatggcgataccctcttctgggacatgtcctccatcgatctcgacgcgagctccgactttgtcaaggcgggcttcaccgttgtgcccagtgactcgagctgcaagacggtttcttgtgccgctggcgatgcggactgcaaggatgcttatcagctccccgacgacgtgaacacctactcgtgctctctgagcgccgatttcactcttactctgggataaattttttttcttttcttaaaaccggcagggccgatggaattttggggtttttttggattttttttttagattgcagaacataacttcctccttgggttgttgatagactcttggatatgtatttacttctggagtcgatgtttactatttagcagtgagcttatcaagtatcactagcacaatataagaatgtgttgaaaaagatctcatgtccaactatcaagatgtaagtgtaacgctatgttcgtataattggttttgcttcaagcatatactagggacttgctattctcctgtccaggagagatgtcttctccctcctctctccagccgcagacaggtcacagatcatcccactttcgatccaccatcagtcatcgacagacatagacaaacatggcctattattctcttaagcaatcattgaggtcaatttcaccatgacatattacccctttatcccagtcaaccaaggggtaaagtgcccctcatggtggaattgactccagtgattgcccaagaaaagaaaaagaggatatggctaaagtccgtcgacaaatgatggcggatcaaaagcggaggagcatcatatgcttatgtacctgtctgcagaggggagaaggggagaagatgccaacacacgtatgtttcatattgggctggcccagttcttggcagacacgtgaaggtctccgcctcaggtgtcaacgaaccccgcaacgtaacgtggtgactaatctcggccaagtcgtgtaggccgaggctcatttcgagtctgtgaccaccgaggttgctttgctttataggttggtcgcaccccgtctgaaccttctcttccccaggttttcttcttccattgcctgcaccccacatatcttcataatggcttctcctcgtaagtgttctatatcccctatgtttactctgcaccttatttccatgtgatcctctgcatggctccatgtgggcccatactttcaacagtgttaaccgggaccgttgaacagaacaaatccgtaccccgatcactgatctgctcaagatcaaccaccccatcctgctggcaggcatgaacgtggctgcggggcccaagctggccgccgctgtcaccaacgccggtggtctgggtgtgatcggcggtgttggctactcccccgagatgctacgcgaacaaatcgccgaactcaagagctaccttaacgacaagaacgctcccttcggtgtcgacctcctccttccccaggttggcggtagtgcccgcaagaccaagtaagaaccttcgctgcggtacttttccgttgttgacacgtgctaatcgcgttttgtttcggcaaatagctacgactacaccaagggcaagctcggtgagctcgttgatattatcatccaggagaaggctagccttttcgtctccgccgtcggcgtcccccccaaggctgttgtcgacaagctccacagtgccggcatcctctgcatgaacatgatcggccaccccaagcacgtccagaaggccctggatgttggtattgatattatctgcgcacagggtggtgagggcggtggtcacaccggtgatgtccctaccaccatcctcatccccaccgttgccaagttggtcgagggcaagaagagccctctgaccggccagcccgtgcaagtcatcgcggccggcggtctgttcaacggtaactcggttgctgctgctctgatgctgggtgcctccgctgtctggatcggtacccgcttcatcctggctgatgaggctggcgcccccgccgctcaccaggaggccgtccgcacttccaacttcgaggacaacattcgtaccattatcttcactgtatgtatcaccagcgatgttattttcaaggcgtccatgttgctaacaaccgatatagggacgtcccctccgtgttcgcaagaacccttacatcgtcaactgggaggagaaccgtcacgatgagatcaaggagctcacctccaagggtatcatccctgtcgagcacgatatggagaacttgcccgatgatgtcgatgacgagactttggacaatgcccgtccttggctgatgggcaaggttgccgccgttgtcaacgagaagaagcctgccaaggctatcgttgacgagctcgtcagcgatgccgctgtcctgctccagaagggcaacaagatggttgctaagctgtaaataattattccctatattctcgatctctatagtcatgttcagcgttggataataaaacttgaccggtgatattcccggccgacctttggaacttacctgaattttgctcgatgtacttggacgtcacccgatgtctaatgtaggttagcgttgtatgatcccctctccaggccgctatggaattatccctgctctttcccaaaccttccttgatccaaaaaaagctcttaagcgcctgggtggggtatcaactatcaatcaccctagttactccgtattccacgtggaaatcacatccataatcgttatgtaccggcattagttagtcaattatgatataaatagattgtctatccttatatttctcattttgcttcccgtgtcccgtgtctacatgatcggtgcttttgctcgctttccttgtgttgagaccactccaagcttggtatatctcattccgtctgtaatattcattaaatctcaactcggatcgtcctctcgctgcaaaatactcctagaaactgagtatccgttccacaatctagacaaacagccgaggtccgcacgctccattgtgttctcgatcggcacccgagcgcattagacactactgcacctataggcagggttaatccgtaagagtaaatacacacatatatggagctgcaacgcaaggtacacagaaatcccagttggttcaatccgtgtgcaggtggacctagtgggtctgacagggtgtttgtagccgtattaggcttagctcctgagactaggtatgggatgctccgagccaaaagaatctcggatttcttggtgtatcatgtatggatgttacaattacctggctgatcagctagaagtcggctcggtcaggtggaacagtttgataatcggaggtctaacggccgagagattagccaagcataggaaacatttagcaattacatgcgacataccgagtacataagaccagcacggagctcattcagagcagtggatacgttcctgggaattggtctgtgagtccaatggaaagtgaagtggagatttcaatggctaaatataaaagtcagtgcagtcggtaccattgagcaaagggaggtccgtggtatgacgtcctgggaggcgttcgctagatcgtacggaaagaacatccgtgatttgagtctttaaccttttcaatcaccgtgctttatggtcccacatgatgtgatgttttctgtacgtgttgcagctgtgccgtcttaggccctacaacggtggctgaatacggagagtttttggccaatgaggcatggatataccagtgtttttgctggatgcttctaggtcacttgaattgggattgaggcgtcgaattcgaaagctgcttgccaatcttcggtgactcgaacgcaccatagaaatgttttccggcgtttgacgcggtgtcggccggaaagccacagagactaacaatatctagattttcatgttccatcgttaatcattctctgtgtatgcgcattagtatggtctatcaatccatggatgtctggtaagcgggtcgggccggtcccatggtgaaccatcaaagacttagacagccagctgtaaattgtattcatgttgaagttggagataattccatagacaccaattgatcgaaatgatttctcaccgttggctgatgtgggccgactcggtatgggccatcggccgttcttacccgagtacacaccgattgggacttggcgaggagataatgaaaagggacagtcttggaagtcagtttcttgtgtaacacccccaattgaacggaacacagtcaaatatcgtgagcactagagcggaaagggaaaggccgtgaagtgtatatatagccttgtggagggatcatcggcgccagggaccttgaccagaactatatacggagcaactcactatctcgaagaatcgactccgtccttcgctttcagacatccgtagcgagaggttgggtgtcgataccctcgggccctgttcaactctaaataaagcactgcaagcgccgtggcggggaatgaattgaagtgaccagggggccgaggaccaatgaaccatgaattctcccacgcgatagaccggattcaaatcccaagggaatatccccgcactgtccagacgcggccggtgttcaattatagagtcgaatgaaagtcaaagcacgtcgggagtcaaagcccatggactattggccgaagtgagaaggtaggttggctgtcactgatcacaatacgatgccatgtcggaaatccgcccactcataggctcggcagtacgaaaacgcttgtgtgggctcctattgaccgaggcgtgcataattgctgcagcaaagcgggttatttttggcccatcacctcgcttttttctgtcgaagtagcctttccaggactcgcatcttttcccctgcccctccgtgcagcgctctctgcaggttctctaagattcgggcttttctttgcttttttgggattttcgatttttctctgcaattcgtcttttcttttcttttttctttttccgcttcattttttcccccttatcccgctaaccctccaattcttctgggatccaagtcgctgggacgccccctcatctccactcaaccccgtcggaggttaagccaattagtttcgcaatcgcatctgatagcactctacagtgattatctataaatacattgcaactgatatccagcctttgcacgtcaatctcgggatatcacattacctcacgggattattcgcctggagccaatcctctccccgcagctcgtcccatcgcactgttcttggcccctctatcacctccaaggtttttttcgtcacaccgactgagcccttggccattggcgcgattatattacttgcgctttcccggctttgcgctggaaggtgagcccacaaagtggcggaacccgagactattatcgtgccctagttggatggaaagtacttgcaaagtctttcaatctatatcatctaggcacactttgcagattccgggacaatgtcgctcaagcaagtatgtatatcggtgatctcggaacataaccatgctgatactgtgatcaataaggaaatcgaaacatgggtgcaggcccttgaggcctatgacaatcaggaatttgaagagtccctgcgatgcttctatatgatttccgatacatcaaagatcttgtttaactgtggagtgatctacgcaacgctaggcgaccatcataaagcagtaagtgatcccatgagaggttttcccgacagtaactgatttggtgcaggtagaatgctatcaacgtgctgtcggcctagaccggtatctggcaatcgcttacttccagcaaggtgtatctaatttcttgctcggagacttcgaagaagcgttggccaactttaatgacactttgctgtatctgcgaggaaatacttctatcgactatgaacagttaggtcttctattccgcctgttctcatgcgaagtcctgttcaatcggggtctatgctatatctatctccgccaaatgaacccaggcatccaggacctggagtatgcagccaaggaaaaggttactccagaccacgatgtgattgacgatgccattcgcgagaatgcagatgtatgttactctactaaattgctggatacaagctaattcaaatacagggctataccgtcttctcaattccagtgggagtcctctaccgtcccaacgcagccaaagtcaagaatctcaagacaaaagactacctaggcaaggctcgactagttgcggcgtcggaccgcaaccaatcatcagatcaccaatggaatccaatagtcattaaagaagccctccaaagccgcgaaaaagtccccttcgccacatccaacctggtacgccacaatctcagcagccgtactcgtcaacaatccgaaccacccctaagccgcaacgtattccctccaacaccgccaccagacgaccgatcagccagcacagcatcgggggtatccggacaccaccgatcatcatcactgcgaaatgtccgtccaccacgtctggacctagaccgcacaggtgccagcctagaccgccgacccaactcacaagaacaggcctccaccgagagaccacggataggaacgacgcgcacagcctccgagccgcgcgggccctcctcccgccaaaacgtgcgcggctacccacaggaaagccgaagcagcatggcccgcgagcaagccggccaccgcagaaacctcagcgacacaaacccttccttccaaccggaatccgagtacggcaccagcgaccagcacgacccgcactcaagccagcgcaacctagcccacgcaggctggggccgcgggtcccgccaccaaccaccgcaatacatcgacgaagaggaagaatacggcagcgacacatgcgacgcaacaaccctccacgacggcggcttcgagctcgtcggtgcgacccctggtccaagccagcaacgccgcacccgctctccggcgcgatactcccgccatgcgaacccgcgcaggcccgagattcagaaattcaggacgaaagtccacgccccggatgatactaggtatatcatgatcgggccggagatcgagttcggggaattcgaaaagcgcgtgcgggagaagttcggcttcaggtgtcctttgaagatgaaggtgcaggatgacggggacatgattaccatggtggaccaggaagatttggatttgctggttagttcggcgaaggaggttgctcggcgggaggggagtgagatggggaagatcgaggtgagtctatctgcactttatgaatctttgaaacatgcatatcctgactggtttcatcgtttagatatgggtcgaagagcgctcaatgatttgatgcatgattggaatttcttctctgttgatattagcatcgtgattttgtctataccctttttttacgtatttagcatgaaaatacgaccaatgcatgagagatagtgatgtaattctctttcaatcgagctcgaacttaaggaaattcgttgacggaaacataagattggagatgtcattggcatttgccctggtggcaacggaaaaacttgattcttggactggcacttttaaaacaacatggtccgcttcgcagtacaggtttcgagcgaatgtcttcgttgcttccgcatgtcttgctcgttttccaacagtctctcctgcacatagcggcttccgctggggtcgtgcttcactcgctcgtcgttgaggatgtttgtgagcgttgctttgacttggcattggtagtcgcggatttgggcattggtggcatcggtggcatcggtgatattgccaaagatgatcgacacctgggagtctttttcgcgaagtatggagtctggggtaattgacctcgtgatggcgggggttgggtttagggtagacagcttggatgctgctaggttgttgtttggaggtggcgccattttgcaggttcatatgatagattggtattgatgaattgatgaatagatggaatttttggaactggtattagaaaaggagatgaagttgcttttaaaaattaatacaggcaagcccccaaactgtgtcaaaggtgacctgacgtctggcggcatatccgaaacctgcctgattgccataaaacgatgtgtttgaacatacgggtatgacatggcgggttccacgaatcagaggctagtgtatgcttggcctttgtgaagatcgtatgaccaagtagtcctagcgtgcagcgttgtcgccactggtggacgtgccgatgacaactacaatacgcaagatgctatatcagattttagttttgtgcttataattccctatcctggtcattcttatgatatactattgactttcctcaatgatctagaatcaaccggtcaagtatagtgatgtgcgttgtgtgcgtttatggagttcaggcgcgtaaggaactactccgtaggcgataatggattcattgctaaggcgctagatcggataccgaaatcacccgtgtctctcaatctcctattcagcatcggtctttgtctgtccagtctctttctcctcggtttcaaactcggctgtacctccaatccaacagccactggcattgccacccccaagcctgaacctcaaattaatctcacggtaacggtcgttgtcgcaaggctccctgatctgaagtggctcaacaggtctgtcgacaaagccatttatcaaaagcgcaaaagccaaagcagtcgtggtgtcctcccaattcgcatcgggttcaggaacctgtctcacttcgtactcctgccgtatttcgtcgacgatggcatacagacacaatccagggctctgaatcctttcaagaagcttcttgacgagatcatcgtccagcttcaagtcacgcaatctcctaaccgatctgatcggaatcagtgtcgttgagattatgtccgtgtcagcatcgtcgaccgtgccagcattgtggaccattccaggtgcaatgtcagatctcgaaatcttcaaatcggacagaatgacatccatgttttcggtattcacagtgttcatgtcacatgccaggttgaagaactcaacccagatgttctccttggcgttgtctttgtcggtggtcttcgtgatctttgcttccacacagtcgctcttggtcaagatgcggaggtcgccccgcggcatcatcccaagcttcgagagtagccacacagttccgatcattacatgagcacacttctctagttcatggtctgggtgccagacgcggatctcatagtccaagtcggagtctgctggtgcggagaagacgaacccgctcgggtggccgtaatttgtggtaaggttttgcatttcttcgtcggacaggccattggcatttaggacaactgaaattatacccttgccgtctggacctgcaggagagacccgtagaatgtgggcttggacattctctattacagatggatgtggtagagatgatgtcgcctccattgtagatggattgatgtagtggttagatgggtgagacggttttgtgtagacgcgataccactcgcgaagtgatacggtacatggtgaagagtaagagaagcaagtactaaagacaattcaatacggagtatagtaggtggtattcctctgttccaaatacggcgtaccccgtatgtataaacaaatacagcacgcgggatagaccactcgcgcagtgacgttgaatgttgatcgacaagtgtacagttgtatagcaacaacacatttcaaaccatgccactcccacaatgaccgacctaacaccaactctcaacaagctgctctcaaagcaaagctcaccactcccacaaaccaaaccctgcacagaaaccgccgacgagttcctaaaggaggcataccgaattgtaagccaccctcactaacactataccaaaagcaaaccagaaaacaaaacctaacaaaaagcaccacccagaactcccacatccactctctcctccaatacctccaatcaatccgccacgcctacctctcaacaacacaaccacaccgccgcaacccaaccccaaacaccaacccaaacaccaaccccaaaaatgcaaccccaaccccctcaacaaacctcacagatcccgaacgtgacgcagtcgacacatcaacagccctcctcctccgcgacctagcaacctcaatcgcaaacctctcctccgccgaaaccctccgccaagaaacctcacagaccctcctgcacaagaaatacggacactcggccgccggcgcactcctctggcgctgggccgggggaagcggcgcgctagacagcgccagcgacgagggcaagtccgccgagcaggtgcgtgccgaggagagcgcgcggttgatagcgacgatccgcgagagcgtgctttggttcctgcggcgcgggctggagtgcgctgtcggtgtgcagcggcggatggtcgagaagaggattgagagggtgcgggagaaggagaagagcgtgctttacaaggttggtgcgggtggggttaggaaggggtctgtttctggttctatggatagggctggggctggagctggggctggggctggaggtcggggcgcgggttcgttcgatcctatgtcccaggcgcctgatgcggcggttctgagtgaggcggacacggcgcggatcgaggcgcagctttcgccggagcagttgcagctttttgcggaggagaatgattctatgcttaagcattatgaggatacgttggggaaggtccagtatgtttctttttccttttccttttcttatatgttatgctgggtttttgttgcataatgctaaccatgccctctttagaaacgctgagaaatctctcctggagatctcctctttgcaggaaacgcttgtctcgcatcttgctacacaggaggagcatatttcccagcttgtcgcggacgtggatacgacgcatacgaatgtcgggcagggaaatcgggagttgaagcgtgctaccgagcgacggagtacggctcaggctgttttctggggtactgtcgggctgtgtacctggcttgtggtctgggatttggtcttctagtctggtgctactgaaggatttgtcggaagctttggagagctgttttataccatacataccattatgtctatttcattgaagtgtagcattttatctcaagatctctcggggaggacgtgattgttattgtgtctgtctaactgttgagtgtatacttcccaaagaccttactgttgacggcccggtctagctaaatgaatcgagattcatccgcggactagcgtaatgcacagaccattggataaaataaccctacgttgtataacaatccaatgccgcatgctatatctatcatttaaatgatggatatgataacgcaaggaacgagaaatgcaaatccagaccgaagtccagagtactatggtaaattgatgcatcaaatgaaagtccttccgaactttaaagaaaaagctcacgttcaaaaaggatagaattaaagaaaaacgccagaccaagtctcctcgagtgtttccactatgtcaagaccggggtatcaggggtatgagggaagtatcacaaagcagactcgcgaacaacactatcaaccgcctccgcgaagtagtcgatgttattcgagttcaagccggccattgagatgcggccgttctttgtctgcgagtagaagaagagttaggaattgtgattccagacgatgtaacactgggaaaggagggagaaaaacataccatgtagatgtgccacttcgagcgcaacgttaagacctgctccactgagagacccgtgaaactgaacatcccaatctgcgaggtaatatgatcccacgaaccaggcgtaccaagcttctcaagacgatcccgtaacccttgtctcatatccaggatccgcccactcatcgtgcgcagatctgcctcccattccttaaagagaacagggtcattgagcacgcgactagcaatgcgcgcaccgtaagcaggagggtttgagatctccgagcgctgcaggatagccagttgggaggcgatgtgagaggaggcagccgcggcgtccggaccgggcgcggagacgaagtggaaggcgccggtgcgctcgccgtagagaccgaagttcttggcgaaggactgcgcgacgcacagctcgaagccttgctcgacgaagtagcggatggaccaggagtcgcggaccaggtcgccggatgcgaagccttggtaagcggtgtcgaagaaggggaagtgcgaacgcgagcgcatgaccgcggcgatctgcttccattgttcttgggtggggtcgacgcctgttgggttgtgcgcgcaggcgtgtagaacgactacggagccgtggggtgcttcttccaatgctgcgatcatgccggtgaagtcaaggccttttgtcttggcgtcaaagtagggataatgggcaagcggtaggccgacgtttgtaaagatttggttgtggttcgcccatgttgggtttgagaggtagactgtgggcttgtgggggtggaacctggcgaggaagaggccgcctagatggacggcgccggtgccagagatggtctgcaacgtgcaaatctagggcggggttagtttggaggtttggaaatattggagtaaacagctacatactcggttttcacgaatggcagggctgtctgcgccgacgatgagtttctgagctgcagaggtgaagtcggcgagaccaccaatggagagatattcgtggttgagagtaggatcgttgtggatagcgtcatcggcctgtcgaagtatgtcagatcactgcggggacagaagtatagagatagatatagatgtagatagttagtaccttcttgacgaccgggagaacccagggctttgcgttatcgtcacggtaggcaccaatacccagatcgaccttgttaggtgaggggtcttctcgaaaggccttcataagaccaaacaagggatcctcgggtgcggcagcgacaagagccgccgtaaatactgatggattggatgagcccatgatgtgtgatgttagagaggaaagacgctcccttgcaatctggagcgaagtcatggtgaaattatataatcaaaaataccccaggtggtacaaaggtattccccggaatcaccgaaacgggatattcctgcttgcgttcaccggactggagtgagggggtggggttggctcgggggaatcagcgcgcgtcgtttgctaagcagaagaaaaaatagtatacagctgtaaggtgtacggagtacgttggtatcgtctttcattcttatattctatctcgctgcccctatcatatcctcggcgcacaagataccgagggagaacatgccgtatctttctcgttttgatggtcacatgccagtatatcgccagtgggactatgcttgattattataggaacacaaacgtacggacataaacacctgatggaaatctcaaacacattccctgcctccgacaggctgcacgcgccgattacaaacagtgtgtcatacaacgccgacgaaaaaaagacgcactgtggagacctttctggcagctaggatcgttgcatgataggtctctcagggggttgtattttatatgtctcaatggcctattaactcggtgggtatttagataactgcaggtataggcaatacctcgcaggatcggactttgaatatgaaacagttctcgcaattctagaggctccataattataaatccatgtggtatgtgtcattcccccacactcgtgaggggactaaaataactcatgaggagcatcccgggaccgagtctccgaagaagatttggggatagggcggacttgctccgattcttccccacagagaaatgatgatattgtttgtacagagatagagagtagtaagatcatataacgaatgtaataggatatatacagtacaatctaaaatatacgctgtaacacggcctaattgaaatgataacagaccattactccaaatacgcaaaacggggtatagatggtgtacggaaaccagattttgagtcagccgctgacgtaatcatcagccaatcggtcagacggtcgtgcctggcgatctcaacatcatgaggtgggtactttggcaaaggtactgaatctgatattctgatattgaagctatccggtacttatgtgctccctgtgacctggcacagcctcaaattattcaagtctacggtgtagggagaatctgatatcagataattcgatctgagtctagatctctgtccgcgtgatcgagatatgtcgatcccatctctatctctatctcaagataaatccaactgaaatgtacgtgaccctaaattcatgatatacaaaaagtatatacagagaagagatacaaataaattactgagaaaccagtctctcttttccaaccgtcacaaaacgccaatgctcaaacaatccaatggacaagaaataaaaaccaacccattgaaaaataacgccagcctcctatcgaagacctgaaatcatcggaatcataaatcgaaaatatatgcacgtaaaggagtaaaatcatcatgcagtagacggcgtgagatggacggtcgctggagccgccggagaaggcgcagtgtcggcgtccgcgggtgtctcagcctcagcaccgtgggcgcgggttcggatgcggaagcgatcgcggagtcgggtagtcaggccacggtgtgcttctccttcgggcgcaggttccccttggcttgcttcgcggacgtgtcggagcgcggcgagacgctcctcgacggtggcatcgcgcattcgtcgggcgttgagggggccgtggaggtagttggtgagacgacggtgagtatggcggtgggcttcttccgctgtttggtttggtccgccttctgcgggttgaccgggttggtcgacgttctcttcctctggattctcgggttggggtgggttcaggtcgatgcggctgtgattggttagtttgggtgttgatagttgataagttatcatatcgacataccagagtggacatgtgccggacacgttcattaaccacgggtcaatgcattccacgtggaattggtgattacaaggtagtacacgtaggtcttggcccttgacaaagtcatccgtgcaaatgggacacgagaagttacctccgtcatgcacctcggtcttggcttcgggggctgtgggggtggggcgctcattatcgtctggggttggcatttcggattcgtggagggtcgatatctccgtgtgaccatcggcctgaggctcggagtgctcgcgatcctcagggcttatggtcatctcgacatctcttttggccgcctcgacgtcatcatttttttcatcaaacttgacgaccggtatcgtgtctaacatggctcgagctatacctcgggctcgactttgccggactcgcccggcaatccggcgagggccgtatcgctcggggtggcgatgagcacggactgcacccgtgataatgatgcccaggaacagggccgtgatgataccggtgatgctgtacaggatgatcatcgctggaaaaagtcaacaaaccgagcaggatagaagaagtcgggatacaaaccagtgttcgggctgtcgcccgtaccaccggaatcactgtcagatgggacaccagagaggtacgacattgagacgatgctgatcgttgttgtgttatcgaaagcacggagtagtgcagagtagccgccttggctggtgaaagtaaagatgttgggataccggttagcaatcggatcattggaggtgagattgcagccgatagctgttttgctgtatagtagaatggcagcggatccagaggtgacgtattcaattgtctggccaacgcggatattcccggtatactcgtcctggtcgcaagatatgaaagcgatctgcgagctcttcaagtcgagcgaattgctggggatgactcgagtgacaacgccggacacattaaaggcctgaagtagtcagtggtgcccccacggacgataagagcgtatggcaccttgagtttgtcgtcggttgattgaatcagcgagttggttaaggggaccagattctgaccagtcagagtgcttccctcaatgcgaaacccggtggattggatccggacggtggtatttgatggtagcgaaacaacctcagcctggactgagaagaacaggagaaagaaaagaaacagtcccattgcgggagacggcggaatggaagaataaatgtgtggggtcacattagtcaagtggatggtgccctggtggatgagcgttgcataaaaaaaagagagcgaaactgggaaaaccagaaaatgaggggagagatcggccctaagagggccctaagaggatccaagcggataagagagattaggcgattgatttcggttattacatattatgttgttatagattgctttatcttgtagttatatatgttggagttatgttgtaggtttagggtacataactatgtcaggataacgtggttaaaatggttaacatggttaacaagggcatcctcactaccacatatacagcagaataatcattgacgatcacacttggaaacgtcatcgctggacttaccctaactacatctgcacagggcgatctttcgatgtaaatcagcatcatcgctctcgtattcgctgtcctcgcccaacttgcccagttagtgtgattaatattccggacttccgatcactgtctcagttcttctcttttaattttctgcacgttctatcttcagacccaaggcatttagcctgatcattccctggtctcaatgtggttttgatatgggatgatcctaatctgacatgcttactcgacttccaaggttcttcagctcaggattattgttccacgatcaacgctaccccgcagatacctattgaaatcaatgcaccccatgttatttgacccaccgagggaaagagagagtagaaaataagtaaagaggggtgaattgtcgaatagaccacacattagtactaagtgcatggatgtccagtctagtctcttccgaatatcaaatccggagagcgaacgggaagagaggtttaaagtatagtcctagcaccggattaagtctccgctttcttggtatgatctgatatgtaactacctatatatacttggacttatatatatcctatcgtatgagtgccttgaccctacataccatacagtccttcctcacccaaataaatacgaattcctcctgagtggcgagagtagggcctcggctctcatcaggcccggcgtgcattgtcttagtactccataacacggtgggaaaaaaagaggaaaatagaaaatagaaaacgacgaaaaacagccagaaaccaaatggaaaccaaatgagaccaagaggaaaggaaaaaccaggccataaagtaaaataacaacaaaatcgatctagatcatctccaaagaaagcaaagtaaaaaggtctggtattaatagaaacatctctgcctcttcctctgctcatttttagcttcgtccccctctctgagcggcaaaacccgcccttcaaaagttcaattctcccttccccatccttctcctccatttttgtcactctcgactcatctctccttttggggacatgtcgtgaaaaaacaccaatctgctttgtctttatcaccttcgtgggcaacatcatgcccgagaccgctaccccgagccgggcctggcaacaccgctttgacgggaagccaatctcgtcgtaagcatctttatagacctctcgggaaacgatggccgatggcatcgaccctatcaagtgcttcccctttctaatcccatatcccccccccacaggaatcccgccatcgccgaactcgatatcgaacggaatgagttggcccacacgtggaaaaggtttatcagcctcctcctgccccaggatcaggtgcaatgggaggaacggccacagacggtgctcgacgtgcagaccttgctcagcaatatcaaggcattttggatgtcccgcccccgacaacgggtctttagcgactccatggacttgtgtgatcgactcctgccgacggtgaacacgcacgcgaccctcctgtcgaccctcccggactcgatggcatatacccctttgttctacggagtgcttcaatcggtgatcaaggtgcgtgcataccgacacacaaggctacgtggcattgctaacctccggtcaggcgtcgtcacattaccctcgcgtaatggagggcctagctactgccctgctaaatattcacgatgctctaggtctgcccagtgattctagtctaatgtcaaacgccgtccaacatattaccaaaacctatgctctaatattcttctttctgaccgaattcatggactggtatgtgcggaggtccacgtgccagttgctgaacatgcatagccaggatgtgtactcggaattccatcacctggtactctatatacaactgcaagcacacaatattccatggcaacattccgagatggacgtcgacgaggaggaggaggacccatatagcgctcgggcactgtgggaggagtcccggctcagccaagtaggacgccggggaaaggaccgtcggatagcggcacagaataccatcactcgccggcttatttgggagattcagcaagacgcagcggagcgcaatcggtatagggagggccgggatcggttgttggcagagacattgagctccgtgcgcgagcaactggagccagtcaatgaacagagcaatggcattgtctgcataaccacgcctcctgctccgaatataggtaaagtcatatctgtctggagctcggttcaccgtctgacgtaatgacagacacgtcctcttttgaatggtcgcggggatccaagcgccgtctcgcacgccttgagattcaaagttcatccaagcacctccaggacttcttcgatagtgatgatcagatttgcgacttcgaacccgacgccaaagtcgtcgccgagggaaatatcgtcgcctctctacagcaatgggccaccagttcgcgatctcaggctttagccgtgggcgggactcaacctactgcttctctcgacccggtggctctaatttcggcttgctacgcttccttcgcgcggcaagctcgattgcccgtcgtctctcatttctgcgcccttcctagccaggaggtcaaagggctgaatctccaggagcaaggcttagttgccctcacctacagtataatccggcaattagtcgactggcttcctcctgtagtcgacagcgacgctgtcctggatctcagcgcggagcgctttcgccaactagacggaacgctcactagctggaaagccgctctatcgctagtcgacaccctcttacaatctgccccaccactgctggtctttataatcgacggcttagacgccatccacgatccgtctactgacggagcaatccgtgaactcgtccgcgtgttgctcacccacacccggcgtcagccccaaggtggtctcaacgggcaaggccctactctcctcctgaaggtactcttcactgttaccggcagaccgagtgccttgatcgagacaatgtcggaacacacactcatcctcagcgaatccaaaaccaacgaacccacgccgtccgaaccggtcctcacatcggacatcggagcggtcatgatgaatgcatgaattgtcacgcccagtgccgtttacgaaattctttttctgctgtttttggctaaaaaacgtttttgaagttcaagcatagatttgcgtgggttgggaatatttggatcttatgaaacaggcaccacaccacttatttatgcatgggtgtttgtcttcttctacaggcaaggctttcctgcgttcggcgttctcctgttgctttttggcgtccgggaggaccgaatggtttatttggtttctttttttttgtgcttcggtggtagtggtagacctgtactatactgcttgatagctgtgatacccatctaggtctaggattcatttgctattcttattttcgaacttgctcgtgctgtttaacggaaactcttttccgcgtcgcatctcggcactccgtatagccgatcacaatgcggggagccgatggacattggtttccgcctcaaaaaaatatttaaacggttcaccgaatgcatcaattgggatatacacatacacttacctatatgctgtaatacacacgatatacgcaatcatgaacggccacggagtttcgtcccgtctctactccccctccaccccgcaactcgccgagttcaaagacatttgctcgcgaaccacagaccctgcaacctacccactagccagcgaagtcaaatccaacatccccatctacgacctcgcggccctcgaatccaccggcctgacagcagaccttatcaaccgcctgcaagatgaatggcaccacatcctccacaccggggcgggcgtctacgtgctccggtccatgtacgcacccgcgaaatacgaaagaaccctaaacaccaccaacgaggccttcaacgcgatcatcgcgcgcgaagccgcccaatcaaccaagaaaggcgaccacttcgccgtcggcggctccaacgaccgcatctggaactccttctcaaaacacgccctgcaagacccatcctccttcatcgactactactccaacccgtggctcgcaatcgtctccgagtcctggctgggcccggcctaccgtgtgaccgcccaagtcaacgccgtgcaccccggcggcgccgctcaggaagcccaccgcgactaccacctcggcttccaggaagaagtcgcctgcaagcgctacccagccgcgacgcagctgacctcgcagttcctgacgctgcagggcgcggtcgcgcacagcgacatgcctatctcgagcggcccaacccgcttcctgcccttcagccagacgtacaagtccgggtatctggcgtggcgcaagcccgagttccgcgctttcttccaggagagctatgttgcgctgccattgagctttggcgacgggttgttctttaacccggcgctgttccatgctgccggtgctaacgagatggatccccagaatgggggcttccgacgtgtggcgaatttgctgcagattagtagtgcctttggaaagcctatggagacggttgattccgtgccgcttgtggatgcgacttgggatttgctgcttgagcggttccgcgctgctggcggcgctttggcgacccaggaacttgaccctgatacgtattcgttgcagcagagggaaattagggcttttgtacaggctgttgcggagggatatcctttccctacgaatttggatcagagaccgcctgcgctgagcggcatggcgccggagagtgagcaggatattgtggtgaaggggttggagggtggttgggataggaagcaggttgttgctgcgctggagaagatccatgttgactcgcgggcgtaaagcaggggtctttcatcccttgcgctgacagtatataccagtataaattaaatatattacgtgtgatgcatctagaaccagtcgtgtgttctttttccccgactaaccgagtcctccgtcactagtcaactagactgttttgatctcaagccacccgctgatgagagttgctcattggacgatcagacctcatcgcgtgtgggggttgtagtggacctgcatgtcgaacttcgcgttggagatcttcttttcaggacacgacacgcagtttgtgcattcaatgtggtagaatagatgaagtataagcgaaatggggacggagagggtctgcagtactccgtgatatggagtcgatcggtcagatacacagactaatcaaaagcaacgaatgacgaggctggaaagattccacaggggggaggaaggggaagatggcggtctcacatttttaccctgttcccccccaacgggtcctgatgaaacacggcatgttggatgtatccatggcgttcgcgtttttcactttcagtcttccttaagtctctacgcttcctttctttcttcctctctcgcaacaccctcttgggccctagtcattcatttactgtacatatgtacatctacggctttggtttgatctctcgctactaaccaattcgccgatccacatctccacctacttgttgaccattgacattcgacgatcgactaccgagtttacgcacactgcgcacactggtccgggaatcatacgaacccataacttggcagctatcgcgagaaaaaaagtacagccgcggaggttattggttcgcccggcgagggggaggcaaaaaacaagcagcgctaccaatagttcgtgtgctataacgggactatttttttttgcgtgtctccaccatagacacgaaagcccctccgcaatcgaaaccactgtcctggtttaggggtgggcccgcattgacgcaataaaggtcctgtctgccttccaagcttctcgcgatgggacgttcgagtctttccatcaggcgactgacggctcaccgatttgagcagctgcacgacatgccggaccatagcagcggcaatgggatgctgaatcctaacgatgtgaccattgatatccctctgaccgagacgacttctcgtggtcaaacgggcgcccgtaaatggaacaccaataccagtgcccaggacttccactcccagaccacggagaaggcacctattgttggcgttcaccgtggtcctggtggtaggcgtcgcatggatacagaaatcaatgaaataaccggaaagcctgctgagtcgcccgaagacggcactatcaaccgtatgggccgtttctaccaagctgtcctgaattactccctcgtcactcgttacctgatttatgtccttccaattgcgattctgatcgccattcccattattgtgggcgctacggcggcaacgtacgccaaaattggcggtgttcatatctactggttcttcacgtggattgagatcgtctggttcagtctgtgggtgtccaagctcttcgcccgttacgttccttatgtcttccagttcttgtgcggtatcgtcagctccggtacacgcaagtatgcgcttattctgcgcgccctcgagacccctattgcgcttgtgctgtgggctgttatttccctcgtgaccttcttgccggttatgacattgactcccggtaagaaggcttccggcgacacggctcccaagtcgtgggagaagagtatcaagaatatcttgtttgcgctgctcgtgtgcagcctcatcttcttggctgagaaagctcttgtgcagctcatctcgatcagttaccaccgtaagcagttcgatgccaagatccaggtctccaagcgcaatgtgtacttggtcaatctgctcttcgaggcttcgcgcaatatgttccccgtgtactgccctgaattccaagatgaggactcactccttttcgattccatcctggttcaggcttgcaataatggtggcaagcggtcctccgctatgcctctccgcatgctccgtaatgtcggcaagaacgttggccgtgttggcgacaaggttaccgctgcttttgggcatgtggcgtcggagctgactggtaagcaagtctttaacccgactgcgacacataccatggttatcgaagcccttgagcgcaagcgccatgctgctgcgctggcccgccgtatctggatgtcgtttgtggtcgagggccgtgaagctttgtacctagaggacattgttgaggtcctgggtgttgaacacgaggctgaggccgaggagtgctttttggctcttgacagggacggcaacggtgatatcagtcttgacgagatggtcatgaccatcaccgagtttggacgcatgagaaaggccctgaaccacagtatgtacgacgtcgaccaggctatccgtgtgctggacaacctgcttctgtgtgtcgctggtctggttggtgttcttgtcttcatttctttcgtcaccactggattcggtaccgtcattgcggctggtgccacttcgctgctctctctcagtttcgtgttttccgttaccgctcaagaagtactcggttcctgcatcttccttttcgttaagcatcccttcgatatcggtgaccgtgtcgaggtcagcgacaagcctttcatcgttgagcgtatctcacttcttttcactgtcttccgcaatgttaccgatgcccgcatcacgcaggtgcctaacaatattctgaacagtctctgggttgacaacttcactcgtgccaaggctatgcacgaacagcttgtcattcccgttgccttcgacaccaccttcgctgaggttcaattgctgcgcactgaaatggagcacttcgttcgcgacaaggataactgccgtgacttccagccggatattgacatcgaacttgacggcgttggtgatatggacaagctccagctgcgggttgacatccgtcacaagtctaactggtctaacgagactatccgcgctgcccggcgatccaagttcctgtgtgcgttggtcctggccgtccgcaagatccaggttcgcgctccaggtgttgcacctccggcagcagaggatgccgacgctgcagatggcgatgacaagggtgatgatgccggcgccggtgcagacgtaggtcaccgcaagtctacccagcccggcgcggccgattcctctaagcccgatcccggtgtcgccgctgccactgccactgccgccggaggtatcctcgaccacgagaatacagcccagtcgacaggctacgaccaggatcgagcaggaacagtcacccatcgcggctccacccaaaccaacgccacacaaaccaacgccgagcgcgaagccgccatcgtcgaactgctcaacgcgcgctccccaactgtcgacatcggccgcgatcactacaacggtcacgagtcagccctccaccgcacagccagcaacgcctcccaccaaacccatctaaacgttccccacggaagcgaaggcatcaaccgcggcctgtcaaccggccaccgcaaggccggcgatcgcgcctccttccaggagcaggatacacatcccgcgctcaggaacccccaagcccctctctccccagtgcccgccggcatgaccccatcctcaagccaagtccccatccttgagacccccaagcccggctcccgtggcagcgcccgctacgagccgcgtccccacgcaagccaggacgaaaagagcaccatccagatgctgggctcccccgaccccaaccgcttcgacggctactactcccacgacacggggtacaatcaaattccgctcggcgggtacagcgctgagaacacaccgggacgcgatcgtcgcgactccaacccgaatatctccagcgtgacggcctccagcaattatcaactctctgaccgatatgaccccgcctcgtcgccgtccatctactccccgcctcagcctcagccgacggtgccacagcaggctgtgacctacaatactgctccgctgaggaagaaggagaagtctccttatggggagcatgaggcttgatcgttttctatctttgtttttgtactgactccctctccttgattacacattcttggctagctgcatctttgcatctttgcatctttttgcatctcctttttcttcttcttggttgttcatattatgtgtgtgatgtatatagattctttcctttgcgtttttgagccgcataaaaattctcctccccttcgtggtatgcggctatgaacctatgctgtcctcggtttttgggcatctaaaatcaaatctactttccttttttcaggacgattccgttggtgcttggatggccatgctacataccgatgcctcttacaacagagacaataggataggcaagtggcattggaacagaaaagaaaggtgctgggactatgctttataccaaaagaaagctgtgatataatacttaataagattgaaacgccccaacgaaaatatcgagcagagaaacagatcatattcccataacctaacacatcgaatacaaagtgatataatacaagtttgactacggagtaagtctaggcaaaatagagctagccacgtccaatcccatcttccaacctatttatttccagtctccttccatggatatccaacaggatcatccttccgcgtccagatcttggtcttcctcttattaaccacatgctcaacaaacacctcgcgcgtgtacttggccttgtactttcggatccagcgcgggtcccaaagttcactcgcaatgcctagatccttgcagcagcgcacgagcgcgttcgatcggcagccttctgtagcggtggggataccgtcgggggagaaatagtcctgttcgccgcgggcgacggagacgaggctggagagaaatgttagctagtgtttaggttctcttgttcctttcccaatacagcctggatgatgaaatcaagactgtaaagcagattgcatgtaaacgaaaggaaaatgtaaatgcgcttaccgtccattacaaacaagagcatactccctcgtcaccgtcttgggcgtaacgatactctcactccgcggcacgagaccccacccgccaggaccgaatgcgcggttgagaatgcgtcggtatttgatctccggcaggtacaggataccatcgggcttgatctcgacctcgtctggctccgtctccgccagcaggatatcggccgcttctttgggaaacggcgcggcagacagaccgtggaaggatcgcgtccagtcgattctctcttcggctgggcgctcaagctcgagcggtttgtctgataggcctgttttggagatgttttcggttgttgcgcggctgggggttgcgcctgggaggcgggatgcggggacgcctgttgggatgggtgttgaaggtgatggggtgggctttgcggcgggcgttgctggtgttggtgttggtgcgggtttggcggtgttctggtttttggtggtgtagctgattgctcttctggtcatcgggctggagaactggctgattctcatgttaggggctcttgaagagcgcgaaggttgtgtcgcattttgaaaggactcgattgcgcgccaggaccggatacgaagaggagcagacatcgtggcttgtattgttgatagcggaaggaggatggaggtcttgcgaaaagcatatatgcagtcacgtgatatggatttgatagcttcgttctgtcaatgttgggataatcgggtgaatattgagtggaatagattgcagggactatttgaacatggtattataggtagagtacattatgcgtctttggtctgtgttcgctggtcgttgccctggcgcttccagcactcgcggaaagcttccatctgtgttgactagagtcagtatgatctgggtaattgaagctatttgctattcctcccattcattggactttggaagttgtattatggttattgcagaactagccctcaatggctttaggtggaatgatatatgttcagttcggtagatttgatagctcacctcttttttgcattcgcgccagtccttctttgcgtagtaacagtcattcatcttatcctgctcagctaatatgtattagtttagcctttgtgactcaaattgagtataagttactatggcagcctgtgctgaaaatccgcttatccctgccattgcagttagcaccacgcagaccagaaacctaatacagggcctcaccaatcatccggctcatcatcatcatctgggacaacagttgtcttctccacgttgttcgacatggctgaggtataacaaggaaagttggagaaaggcggttggcctcggcggaagatggagaactatgcttatcgcatgatctgcctttaccacgaaccaacaatggcaacgccaacgggcaacaacgccaatttcagtggcaaaaggcttaatgtcctagtctattccggttcgctcaatttactcagtctggcagcttaaccgatttctaactgatgacttcttgacaggaaatggaaccaccgttgactcagtccgtcactgcctctacaccctccgccgcctgctcgctcaccgctatgccgtcatccctgtgacgggcgatatgctccttaatgagccatggatgactacgtgtgctatgctggtcatgcccggcggtgcggatatggggtactgtcgcacactcaatggtgtggggaatcggcgcatcgcacaatttgtccgtaatggcgggcggtacctcggcatgtgtgctggtgcctactacggaagcaaaaggtgtgagtttgaggtcggcgataagacaatggaggttgttggggatcgcgaattggctttctatccgggcatctgtcggggcggggcattcccaggcttcgtttaccacagcgaggcgggagcacgtgctgtggaaatcaaagtgatcaagggagctttgaacattggcaccgtgccaaccaacttccggtcgtactataatggcggcggtgtgtttgttgatgcgctgtcgctcgcagataaaggggtagagattcttgcgagctatactgaaaaattgaatgtcgatggaggagatggtacggctgctgttgtctactgcaaattcggtgatggagcagcagttttaagcggacctcatcctgagtatgttttggatttcaattgggaggattaagtcactgacttgtgactagatttgcggctgctaatctggacccgaaggagggcggtcctgaatatgcggacttggtggcggctatcgctgccgatgacaaggaacgaacggacttcttgaaggcttgcctgtccaagcttgaacttgaggtcacacaggacacgacaacagtgccttcactgtcatccttgcacatgtctggaatcgatgccgatggtcccatggatattctgtcgggtcttggagcttcattcacccaagagggtcatactgagtatctcaaggatgactacgatacgttccgcatcgaacgccctggaacatggaatctcggtgaactagaagaagcactccccgcaacatcctcggagtctagcgatggtatcattgattaccaggcaattattaagcgacttgtgttccacgatgatataccatcttcgaaactgactccatacttcaaccaccatgcattctactcccacctccgccaataccaatctgactccaagggagacgctacatcatttggctctaatattctatatggagaggtagtgactagcacgaacacacttcttgaaaagtaagcatttggtcaatatggcatttaatcggctctaacaattagtaggaacacgaagctgctgcgtcagttgccgcagggttttacggctaccgctacagcacaaattgccggacgcggacgcggatccaatgtctgggtctcaccagcaggttctctaatgttttcaactgtggtgcgacacccaatggacaagattcagacagcaccggttgtgttccttcagtacctatcggccatggccgtagtccggggaatcaagaactacgccaaaggctacgacaagatcccgataaaactgaaatggccgaatgatatttgtacgtgcgggtggcttgttttattactatgggttgttactgatagatctctacagatgcattggatccagatgaccccgaacagaaacggtacacgaagatctgcggcattcttatcaactcccatttcatgtcaaacgagtacatctccgtcgtcggtgttggcctcaatgccacaaacgcctctccgacaaccgccttgaccaccctcgccgcacgctacgcgtcgccgggagctgctgccgcttcacctgtcatgcttgagaggctcctggctcgtattttgactacatttgaaagcttgtatacccgcttcttgcgcacaggcttcgatcgagccttcgaggcgatgtattatgaagactggctgcacatgcaccagattgtcacgttggaggaggagggtggtgctcgcgctcgcattcagggtattacgcgtgattttggtcttctgctagccgaggagttggggttcaatgatcgtccgacgggacgtgtgtggcagttacagagtgatagtaacagctttgacttcttccgtgggctggtgaagcggaaggtgtagaccaaaccaaaacagataaataggtcgagacatccatgtctataactactagttcatacatgtgattttgctcatcaatatcccaaagaattaattgtagaccaacagacttaagcgggaacaccctcgaagattgtccctaggtataacaatcacttgccgtgcgagggaccagccagacaaaagtcatgttatcgtcgtcggtggccgcgaatcatagactttgtccttgtccttgaaatgagaggcctcatcaatcgaaatgttcgcgcttatacatgaccttcaatataagcccttttctcaaacaactccccattcagatatgatgtggcgatctaatgtgtatgaagacgttatatatgcagtcggaaaaaagtgcgtagtataggatacaatgtcaaggcctcgactcagcccatgagacccatcgtcggatacactcatccaccctcctcagcgactccttctccgcctcgacctcaaaccactcccgatgctccttcccgcactcgggacattggcctaagtcctgtatacgctgagccgctagctcaaggtgaatgagtcgttccacgcgatgcacatgcgggactttccttcccggtactaaagatgcgctatcctggctagggtgggatggcgtgtaaggatagtaacggatcaaggtcaagtcatatgagcactgtttactccattcagcaagccgacgatgcacattgctcgtgcgtccaattttcagcctaagcgttcccggcttggttgatgtcgggttggaggtgagagcgttcatgtcttgtgctgcacggattgcgtcgctgacgctgcgtggctgcgtgggtgggcggaggctgttgctgctttgcggggcctgcggtagtagagaagatgctatgtctcgcgctaccgcggattcagcgctccgttgtgtggtagttgtcgggggtgtcaaccagaacatgtagatatagccttcgtcatcggcactggatattggtttggccagttctgcaataagaatggatgctgtctgcgggggaactgtagacgggatccacgatgataagggcctgtctgacaaagatggtgacacttgcgcatgctgcggccttccagctgtagcgggcattgcgacattttgatttgaagaaggcggaacgccataagccgggcgaggcggtctcggctgaaatgaggtcggcttgtcatcctcgccgctgtcctctccgatctgaaagcagcagcaaaatgtgtgtttcctccggcgacgcttttcactaggcctactttgatatgtatggggaggctttggcttcgaggagactggatcgtttatctggagcacacccagtcgatccaataatgtatcgatgcttgtccttgtcttaactggggtgatgccattcgtaggtggattcgccgaagtatcttgatctttgtgctgccagcagtacaaagatgctgcatctatagcttcttgacgaggatccctctttcggggggtaggagcaggtgatggatttggagatgccaaagagcggcggcagggccgaccttgggaagtgatgcctctacatgttgtcgctgggtttcgagaatctgagcgcggaagcaaagattctggagtgtttggaatttgaggcatatatgagatgagatcaagtgaaagaatggtatatgttgtagatttctgcgacgtgaacttaaaatgagaaagaaaccattagggaaaaggaaaggacactaggctatgaattgcggtgagcttccaaaattcagcccagaggctacatattctccacttggaccacgtcagtgggacgctgggcagctgagaatagaataggagacttttgttgttgttgttttggtgatcggttgcaccgccacagtaaggcggtgttgtaagtggctgtgctcatgctcattgcctcggcataattggacaagttgtacttgattgctttcattcagtttcaatgattgacctggatataaaacttcaatatgtcttatgttaatatctttcaaaccaggccagtgcttgattctccgcttcatcggcctgtctactggcatcttcctgaaggaaatcagccctgacacagaagccatggccagcgccctcatagaccaccacttcaccctttccaataccggactcgctgaggaagacctgtttgatctgctcaatgtgcggaggtttcacgaccatatctttttctgcaagcgcaaagcttacagggattctgattttctcgatctcgccaggaatctcgagaaagctcgggtggcccgtaaatccagcattaagcagtggttttccatttgaagccgtgtctgctccggcagctagattgacgatatactttccaccccagcagaaaccagctccgtagataggaacctcggcaccttcgttctcgcgtacggacttgaagaagtccctgatgataggccatgtcacgccgaacgtattgtagtacatgaagggcaccattcctgtcagcattgaggctagatagtatctatagcttggattagtagaaagcccgacctgggcggtgttttatcgacttacggcttgataagccaagttgtgagtccgctggtattgaacagctcttttgttgcagacagcatactgaccggggccgcatgtcctgatatcatacttaacgagttatccttagggatgacactaggacataccgttcatgaactcaggtagataaacgaggtacttccccttttccgcgtagttatcggccaagattcggttgttcacaaactcccacccgaaggcgtcaggcactatgatgataattccccggtgaggtacctcatttagaggtttggtcgtgtaggcctgtaagccatggagagaggtgatttcaccacggggaatgccttgatggatatccccactaaaacaattgggacacgacatgttgcgatgagagttaactaggctgataattgcaggatgtgaagtgcaagagactccaagcacttacagattacccctctcggccccccgatcacactaaaccggattaggtcggggttgatatagatcatcaatacgagatgacatttcaccaaacatcaatgctagtgatctcgggggccttaggcctccggatagtcatagcggagagaagtgactaattccaatttccgaggccacgtagtaattagagtacagggggagaacattaaacactctgcccgcacggagtctagtaccttcagaacactctctgttcttagcatctcgacaagattagtactaataggtctctcgattgctagcacgcgagctaaagggcttcaaataacacgagtagccgtatctagcgaatggggattgggttgcttggcgagaaccgggtatgtactttgctctatcaggtgggggcttcctatttcagccgctttaatgagggcgcttggagtcagctgactcagagtagatttcagtccgctcggagatagtcacgtgatatattagtcacgccattgagagcccctggggccccgggccgtgtccacgcggattccttaattagagtttgatcagagacatctactgactcataagaaaacagggacttacgcagtgaaaatgagacgaagaagcaaaaacgcattcgatttagaaggcagatacacgcctaggaaggtctctcagtttaagaagcttcagaattgatcactgggcgggtagaagcaaatgaaaccgggtttacgaccacgtacaaaacactccccggggtgtggaatatacaacatacagattgccaggacgagaaagagagacgtgtccagatcgatctcatattgagttttattttaatctaatagccttttagttgagataaatgcatttgaattcaatggggacctaggtatattgagactgattcggctctctgcatgtctgtctttggaaaaaagaggcgattttagcggagatgcttcttggaaaaggtaagcactagctgtttcaagtcattagttgaggggccaactaagtaatttacaatagaaaagccgcactaagaaatcctaacaaattagagttcttctggtagcgatctctgtactatcggaagtgctgcctgcggaatctttcgcatgaaatgtaaacccgcaatactataaagacgccagggtctcgtctcctgaacgagaactaccaccttcttaagcccttcaatcacctttgcatcttctcctagcatcagtcaccatgtctctccctcctgccgaaaagctccctcttgctctcaggaagaatagtccgtatttcatcatcactcccaccgttgctgaggtacaaaaaagctgactataccttggcatcacagttcgcgacacgtatgagtctgcgaaagagaccattgaagccaacatatcgaaatcactcagcgtcccatggacaattgaagtgaaccctctcgcattatatccttacgcggactcgtcttacgccaaggatgacatgggtgcgatgattgtggagtaagctcacaccttcgtatcggcaccagtggatagtgctgatcttctacatagatacttcaacagtgccgcgtctcacctgaacaacgttgacgagttcgcaaagaccgagatcaacaagttggcccccaaccatgttctgtcattggaagtcgacagcacgcttgaccttaaatacaacggcgttaatttcaacgatggcaacttacgaattgtcgtcaccccgaaggggcttggtgtcaacatagattctgccctagagagcgacaatatgaagctaggactcaatgaagcggctgccaaagctggcggccaggacgacatcagctacattgctcgtgacaacatcggcaagaaatatgatccagtcatcaccaatgtgaagaatcggctggagcaacttttcggtcaaccatttgagcttctcccgaactttgaagacaacttcgccaaagtgaaaaaggagagtcaagtccccggcacaaagctgccggatagttgggaaacaaactttggcgctacggctctggagtacttcgagtcgctagctacacatcttgattggaacaactttggcaaagatgatttgctcaaagaaggattcctcgagtccgtcgacaagggcaaagtcgcactgcgtgtggtggacaagcttgaagggtccagcaactacaatgaagccaagatcgaggatggggtgctatatctgcagaccaaggcagatacttggggtgtgaacacaaatcaagcatcccagaagattgtggatctcctgtaggcaccacacaacaaatacatatctagcccgagcttggtagaatttatatttatactgtgcaatatacttcataatctcttttatagcttagtgcccatgttcacatgaaccgccttagtctggctatatgcctccagacccgcctctcccaactcgcgtccaataccactctgcttcacaccaccgaaaggaatgcgcggatcacagtcttggctactgttaatccagaccataccggactcaatctcagcggccacacggtgagcacgctccaaatcccgcgtgaagacagacgcacctaggccgtaagtgctatcgttggcccgacgaatagcctcttcctcggtatcaaaggggaaaatcacgacgacaggaccaaagacttcttcgcgggcgatgcgcatggaatccgttgcattgacaataacggtaggttgaacaaagtacccattcttgatcttctcgtcagtcggcgtgtaggcagcaccgccagtgagaatagtagctccttcgctcttggcgatttcaaagtaggagaggatgcgctcatattgcgcgcgtgtcacctgcggcccgtgggagactgtctcgtcccactggtctccgatcttcatactctccaccgtcgccttgtaactagcagtgaaggcttcgatgatatcgcggtggacgaagatccgcgaggtggcggtacagatctcgcccttgttggacatgataccgccgtgcgaccacttgaccgcctgctccatatccgcatccgggaaaaccagcaacggggacttgccgcctgtttcgagcgtgatgttcttgagagtgccggcggccatcttcataatctcccgggcggttattgttgatcctgtgaacgcgaccttgtcgaccaatgggtgcgaaacgggcgcggcgccggccccnnnnnnnnnnnnnnnnnnnnnnnnnnnnnnnnnnnnnnnnnnnnnnnnnnnnnnnnnnnnnnnnnnnnnnnnnnnnnnnnnnnnnnnnnnnnnnnnnnnnnnnnnnnnnnnnnnnnnnncgccaagggggcgcaaaaggggcgcggcgccggcctcgcgcccgtagccgttgacgatgtttaccacacctgggggaaatccggcctttttgatcaaagtaccgagaacgagagcgctaagaggggtctgctcggccggcttcagaacaatcgtgtttccacatgctagtgcagggccaagcttccaggtggccattgaaagggggtagttccatggaatgatctggccaactactccaatgggctggcggattgtgtaggcgaactttcgagatgtcgtggtgatggtttgaccaaaggtcttatcagcccagccgctgtaatagcgaattgttgagattgcctcggtgagatcatcattgagggcgacatggtagggttttcctgatttggatgagcaaattgacttttctgagtgatttgcagacataccattatcccaagcttcaatggacgcgaataactctctgctctcctccatcagatcagcgagtcgggccattaactgccctcgctctgtcgcgggaagtaatttccatgaggggtggaccagcgccgctctggcagccttcacggcgcggtcgacatcttgggcgcttgctgcttgaacggtggcaatgggtttatcggtacttgagaatagttagtgatatgtacaacagcgatttcgataatgacatacgcggggtcaagagatgtgatggtctggcctcctgtagcggatacagtttcattgttaatgaatagaccagtgggctgtctgtatttgtgcccgttaggcgtatatatatcaatgaagaggctcattttgtgagttgaacagttttcagagactccaactctcgaggcgcgtggggtctgatatagtacatttctccaatgaggttaagcccattcaggcaagtccttccgatatactctccgcggatgttcgaggttagtggatccgagattaaatgatagaatagttaactatcgtcaatttatcttaatcgtagtattttccattatctaattattccacagccatctctcatgtcagatcagggagtcatgtttagccctaatgcgccactcggagcttatattttctctcggctctgtttggctgaatatgtatgtcgcgagactaattctaattcgatacgctttggatatgaggttaatacaatcaaagaaaacaaactaacaagctcaatataactgaaaagtgacaaatatattgttctgctgcccaaatatgatatagccggctgttgatctctcgtctctggagtgcttcgtacgtacgctgctcttgctgtcacgggatcggcttgccatcttgagggtgtatgggagatgttggtgttgagtgcgcaccgccacggatttgcaacaatatggactaacagccctcatcgcttcctatttgggggctctggttcttcgcgccgtgtcggtcccaggccatttaggagggcgcggagccaatagctgttctagttcatgtatagtgctaattgactgcacggttcagtctcctcagtcgcggacaactagccctcaatggctcatttagttcggagacactgcagcttgcgatcggtctgtatataatagtaggcaaggtagtttgatcagttcgtacgttgtgctggtgctttttgatctacccgacttgttagggtgtagctaaaacccgtcttcgtggtcaagagtgcagtagaaggcaaggatggcatatagtggctcaatatgtcgtggtgtaccattccaccctagatcatcaattcgcttgaagaccaccgtgtgagctctaccgggcaaataactatatccggttgcaacatcttccaaatgtgcgtcgtgggtcagaccagattgcgggtggtgtggatgcagttcgttcgcggatagcactgtatcataagctggcagcatttcagatctttctcagtgtccgagacagcggagcgcagaaattgacgactgaagtttgggcgggtcgttgccactagcgacaatgtgatgccagtgaacgtatctgtgagactctccaatggaacaagggcactaacattgcccttggttgtgtcactaagtccaattccaagttccagggcctggatctgttagccgttctgaaaccgcgacaaaatgggtgaggtactggagcagcatgagaatgcccgctttgaacataggagcgttcgtgtacacgtcttcaagaaagtcacggatggatacattccggaatatcaatagagggtccagcacaccagatagacagtcagcctgtcttgaccttcttcaatgtgtatgtatccacaggtactattcatccaagctggcaccgaaaaggaaggaacgacatgcaaaactctaaaaaaaaagagtaaccaaacatatacgaaagcaaacgccttgatcttctgtgcattttctagattaaagctaggcagacctcactactatagagatgaggttaaaataaggtcgcctgtcaaatatctcctcaccagttatagttgaacagtgaggatcaaacacgacgatatacagattctgattggtcaggattctacaattcgcttaatttctaggctaccatggttcatttagcatagcttgactgtttgatcagaacagcttcaatctactctcattgatccttcaacctgtaatgagttctatctcgattagaactggaatttcgaaaattcaacatctacttgcaatgcggaagcctcaagatttctagaaaatcgcctataactggaaggatcaataatttcagcttggaatcacttcaaacttaatcaaagttacgtgatctacgtgcctgcctgtaggtatataagtagagccccctccccccgcgtgcgcgtaatgtaagtctgtaagtctataagtcatgaattccaaaatggcaagcaatagcacacagaacgaaactcctgcctggctgaattccgtgttccctggcgcttatggcctcattggcctagttgttgtcgtggccctggtcttctgggccattcggtacgtgcagcctgttttgatcgtattggtccgtcatgctaatgagatatatgtccagctttttggccctagaggccagacttagcgacccccaacgggcgctaacagatcatttcatccggcaagttgccgaaatcagaaaggccaaggccgcaagcaaaatggaggagaagaaggagaagaccgaggagaaggatgagaggaaaaagcggtgggcggactggttgctgaagccgttcggttagcataccccagaagtactttttggaagcataggtgttgggaaggatgtatactaaccaagagtgtccgtccctaggccttcttgagatttccttctccaccaatgccatgctccggcgcctcggcagcagcagcaacagaaagaccgaccaccccgttttatacgtcattgtggaggagtttggtgcttctacggcggaagcggaagccgagcttgaagacgtcgactgcgatggcattgtgatccgatgggtgcgtgtcccgcgcgggtaccgtctcccgcccaagtccaagaaggctagcacgttggccgaagttgtcggtgccctccagggcagaaaataaatctttgatcgtcttgtctctaccacctaccccggaaccggccgggatggtggattcgctcatcctttcctcacgcaggccgtaaccccctgctgttacttattgtatatacatgtcgcttgccatgttggcttgtttgggcccttgttggacctcgttggacctttttggccccttttggcccgtccttgtttgttctggattttggattgtttgtttgtcctcgggtgttttggagtttgtttttctttatttataccctggcgttggtgttggcggttgtgctgtttgttctgttctgttatcgttattgaaatattatttattggatccctctatgttgttggaccaaaacgatcctgatcatatcttgatcctctctccattgtagatctgcatgctcacgatacttgtgatgaggaaaaaggatggggcggcagaaacgctacccgtaagcggtcagccgactcacatatctgacagccaatcagcacgtaggatttaacgggcactcacaagtatgtaatcaacctccagggcttccaaggttggaaccttcagaaaaccttctacgcaactaatccattttaggagggtgatcacactatgactcagggatacctattaatgaggatcgtttttctatgctttcttcaatcttctcctggtcctgatgctcatattctacaagtttactcccaaagtactttccaaggctttcttatctttttctcgtgctaagctttccacccacgatcatggagcttttcttctattttctcaaacgcggagcagtagatttctaccggcaaatattcgccgatatgcttcttgccgagcacgctctgcgcgaactatcgcagcgtgaggaatcgctacatcatagagccatggccttacaaaagaccgtagctatcgagtctgatcgactccagcctgacaagaccacccctgtcgagtctaccagggccgagcttgaaaatacgaatcaacagcttaaagagatccaactgcaatattcaagaaaggagtatgccctttaccgagcgacctctgggcttccaccgtactttaaagaactttatgataacttaaggcgtgatcctaactggtttatgcgagaagaactagttcaggattgttcggatcggggcggctgttgcagccgggaatgtggatgctgcgcacagaggtatatgtttcaaaggaagaaaggcagaggtcattgcaccacagagtgccagtgctgtatcggctttcgtggcttcgagtttccagaagaagataaagaagagattagaagagacttcaaagctagggttgaactcgaggacttggcgtactttatgaagctgacaaggtggtctttttgcccgataaagcgccaaaggctttcaaaacaaaagctccggtggcatcgaattttcaccggttccaccgatgagaaagagtcatgaggatggccgtactttgcttgaatgtcgctactttgcttgaatgtcgctactttgctagagaatgatctgctaggggaatagattcttttgactagttacgtagataaagttgatggtgtcacagattagccagctattacagaagaaaatgcgaaaacattgcttcattctggcagtaatatgttgctcaaatagtccgagtgttcaggtagagattgcgcacatgctctttcccccgtgggtgtgcatgatggacttgaaggcctcgcagctttcattctcgtcgtacaatgagataatgcggattacatatctttttgcgaagacgcatagcgtccgcctggtaagaatcggagccttgggtgttctgaagctagcaagacgtaatcatggcaagcagttccagaggggagggggagtagtgctggactattctgtctgccatgagttgtagtagcccactggatacggagtacgagggaagaagatgtcgaccagaaatgacgcacttccgtacgttccttacctctggtgttgtattagtagacgaattagtcttatataggattccgatgaatagcagggaattagagctagaatagaaagaagccttcatcccgatgatagtaatgcatcctaaataggaaaatttgacccaacaaggcaagtcactcctctacagctcggaatgagtagaatcatgaatatggaaacggtaagagattccagcaaaatccaagtatatctagattatgaccacttccaattcaaccatcctcattatctttcccaaccaaatcatctcttcctctatacctctacaaacctccaaaatggcctccctcggcggaataatggtggccctaatcacccccttcacagacgacaagaccgcaatcgatccaagccgcctacaagcacacatcgagcacttgatcacagccggcgtgcacggtctcgttccaggcggcagcaccggcgaattcaccacactgacagtcgccgagcgcaagcaactaaccgagctctgtgtgaagttcgccgcaggccgagtgcccgtcatcgccggcacaggcagcctctcctcggccgaggcagtcgagctctccgtacacgccgcgcaagccggcgccgcggcgaccatggtcgtgcccccgttctacgaccccgtcaacctggaacagctgcacgagctgctgtccgagatccacacggcctcgggcctgcctatcgtctactataatatcccttctgcgtctgggatcaccctctcccctgcggagatcgctggtctgtccaaggtcggcgtcaagtacctcaaggatacctctggtaatgcgcccgcgctgacggagctgatcttcggtctgtcggatcagattgtctcgtttaatgggtgggatactttgactttctatggtcttgcggctggcgcgcccggtggtatctggggtgcggcgaatattatccccgagttggcggttgagctttatgaggcggtttccgtgaagggggatttgaagcgcgggcgggagatttgggcgaaggcttggcctatttgcaagttcttggagtctcataactatgcggctgctgttaagactggtgttgagttgattgggcagcctactgggggcttgcgcaagccttttgctcttctcaatccgaagttgacggcggaacttaagcagttgttgcagaatgctggagttaagactgtttagtattctgttctggattaagatgattgaatgtcggaatgagaatgtcacacttactatccactcaatttattgaatatacaacattggaatcttcttcgttgcgtcgtaaaagtgcataatagagatcgcagaacataaaaaagatgagaatagccacctggatcagcaaaacaatggccatatctgtccttgcttcacagtatcaacccacgatggcatcgattcaccccggttcgcggtcagatgctcatcctgcttgcaccacacttcagtgataatatttctggccgttccaaaagcggcaaagccacatattgagctcgccctatctaacatgatcataatcgcctcccgccttgcggttgacattgcctcacatcctgcaatgaacaacggccacgccgttccgggcccagtgggatcatcttgcgtcaatgtcgcactgcacgcttgaagcgctgtgataacactatcaacatgaccctgcagagccgcagggtgggtttgtcgaattcgtctgtaaaagaaaattacgagagctgcattcaatgcctccaccatgtgaccgtgcgattttgaatcggcgtggagttccaggattccggctcttgttcggcctaggctgaaagagcagatcatgttttccaggcgcgtgctacgtcgctgtagtgtttcccatgcttcgaggttcatggtctgacctgcctcacgggcaatacggaatatctccaaaacgttggctagtcttgttgtttgcgagacaaggctaagccatgtttcggtgatgccataaatttgcttgtataatgtttcagggtaactccgtgagtcctggagatgaatgtcataaagtcccgaagcttggtccttgggttcatcgatattcagatcactatctgagttttgtgtctcgaggcggaggaaatcgtccagccgaggatttggctcagtgctccccatttctgaactcggtgaggatcgtgattgaaaccgagaaccaagtgcttcaaatgaggagggagagaggttatagtcatgtagaacaaatgtgctctcgccgactattcttagccaggtgtagacatgatgcaaaagccgtgcctttttggaaatccgggtctttgaaagtcctcgaagacgtagtagccgctctgcatcaatcataaaacaccgggcgtgttgttgttggccggacatgatctgtgaaagtcagagtcattcaattgaggtcaaattgaaaacccacggtgtactgtatgagaatgaatgcagccatcagctggtctttatattttgctttcttcaaaccctgggtttctgaatgcagagaggtttgcatatggtccttggcttgcagatacgcctgggtggcaaccttccaccaatacccaggcggctttgtcgatattgccgcggggtttaaaacaaggtgaatagcagagcaggcgagcaagccatacaaatttgcaagtttggcatgactgatcctttcagtcccaagaaaggtcgagtcactgtatgtaaccaccgctgccggcacgttcaaaatcttccaaggcgacttttgccgacagggaatggccattatgtgtggaatgacaatatcctggaaatgtctaagcaggcacggagcatctttcagtgcatctatatcagtagaaataagctcagctggtgcgtattgtgttgtgaaagtctgcagctcattggtgtgatttaagtcaacgggcagtcccatctcgtggctcatatcaaatgataaatcattcggcgtactcaaagcaccgtttgctgcaaactccgtctggcctaggtcaaagctcaacagatcagaccaatggaggaagtcatcaatatgagacagggaatcaagtggactaggctcttgcagttcctcaggagccatagtttcggcctcaactgcaaaatttatatcagacttcacgggctcaatttcatgcaccagttcttgtggcttttgtggtgccgaagaaaaatcaagaaccgcaaagggtccaatgacaatgtcaccgtcgagcgaccgttcagggtctcgcagtctcgagtccacttctgccaatgatgcgtcaatagagcctgatataagatcggatccaagcgcagtgctcatagaaactctagattgctctaaaacatgttaataacactaatttgttccatactgtcaaggccatgtacctgaataaagataccggcgagtcccacgagtactctcagcctcctcgccgctatcagtgcgcatccacagtacctgatcggaatatccctcgcatttcacacccaaggcccggcaggtacgacaaacgggccgtttctggtcgcatttgacatgccggcgtctgcaggtgctgcatcctcctagcgcatgggatcggcgaggtcttggtcgtttagatgtcaccatttttgaagacttgatatatatattcaattaaaagagcttattgcggattcatttccatattagaggttgggaagtcgaagttatggccaaccccgccaatatcggaagcgccttcctagatgggatctcttatcgggctatctcctcggagtcaactgctcttgtctttcttttgacaacaattccattccaatcagatcatctcgttgtttgccataaaacatcagtgggacggccaaatcagattgggccggtcaagttgggaatacagctgtcaacccgtttgtttcgcacctgcagtggatgatgtcgtggacttggtatacacgttgagatcagaagtggccgtccaaaacacacacaaggctcgctctagataccaagaacacagtgtcctgagccgtataagcaactctgactctctttttgtagagcctttccttaccagacttgaacccagcacgtttgacagcccatgcgcaatctcctcgacgctcttgtatgaatggcgctgatgtcggttgtataagtcgttggcatttggtaaaagatctgtgcgactgaacattgacccatgacattgtctgaggaatgtcaattcggcaagcgactccgatgatcgtccgtgataggaaaccaactcagaaagcactctataccaaagagaaacaccttatgcacatctcaatccggaaaagggatgacctcggaaggggagagaccatcgggaatccttcatatttgaactgtgccgtcgtcgccttgctctatccattcttcttatccaaattctataaccacatcctaatacatacggtacaatggctcaccgcggggaaacccttcacaaagatgtatgctgcattgccgacctgaagcaaatggggagcagtcggctgtctccgatggtcagaggtgagtaccaatgaatagtttccgacgttggttcattgtgccagtgctgatgtcgatagactactacaacggaggagccatggatctaatcacgtatggaacctcgaagcgcagacccggtccatctccctgacgtatgtctagtctgaacgagaacgaagcagcctacgaccgctacaagatccgcccccggatcttaatcaacgtcgataaaatcgacacaaccgccgaaatcctcggcagcaaggtatgttatattccacttcaacagaaacgaaaacaccagtgccaactccgacaatcaaacaggtctcactcccattcggcttcagccccgctgcatcaatgaaactcgcgcacccagacggcgagctcgcgacctcgcgcgcagccgcaaaatacggtctctgcatgggcctgtcctcatactcgaattatccactcgaggatgttgccgctcagggcaccggcaatccgtatgtgatgcagatgtgtgtactgcgggatcgggcgattacggtgcagttgctagagcgggcggagagtatgtatcttggatgctttttttcatggttgactacatagaccgtactaatatccttttcagaggcggggtacaaggcattattcctgtcggttgatgtacccgtgttaggcaagcgcatcaatgaataccggaatgagtatactatcccggacgatatgtcgtggccgaatgtgcttagccacggaggggatcactcggatcgtaccgagtatggtatgtattgcgaagctgatgtggagttattgtgagggataggtaaatgctgatgttatgcagaccccagtttggactgggataacacgattccttggttgagacagcatacatctctgaagatctggcttaagggtggtatgtttgcgtggagtgatcaagtaaaggggctcgcagttcactgactattggcagtaacgtctcccgaagatatagaactggccatcaaatatggcattgacggtgttgtcatttcgaaccacggtggccggcaactagacggcatgccgtcgacggtggatgcattgcgggcctgtgccccggtagccaaggaccgaatgccgattgcggtggatgggggcatccgacgcggctcggatatcttcaaggcgctggcattgggggctagcttctgttttataggaaggatcccgatctgggggttggctgtatgtgtttgtttgtttgtttgttaattgttctgtttgctgacccatacagtataacggacaagaaggcgttgaattggcgattcggattctccgccaagaactgaggatcaccatggcattagccgggtaagtgattattggtctggtatcaaattaataaaaattaatcggaagcaggtgccgaacgatcagcgaaatccaaaaatgctatctttctgttttgcagccggacggaatcttctcgaaactgtgatacaactgcgatactcggtatttttctctattttgaggcttttatcatacacctccctttgatatgcgcaatgaggtcatgtgctgcatcctcagggcttggtatgtcagctgtcacgatacgagtacttgttccatacaagccgtgtgccaagcccttggcaacccgacagggctgaaggcgactttgccagcgttttcctggagaacgaggctgtgcaggccatacgtgtgccttgtagcctacatagccacagttagtggaataaaacaaggggaaacatggagtcgcgacgtatgttgtatgttgtagagtctagacaccgagtctactcccggggcttgtcctgactcctaagcctcaccgcacaggcaacaccgttattcgttcctatacttagtaacgtgtccacggattgtacaccgtaacctcatagtgcgtaagcgtgtccttaatctccacgggcgctagttcgttgtttcaattttcgccgatcctccacattattggaaaactacatatagcgtccttttctcgcttttctctttttctcttttctatctctacctctgtataccttcactctgaatacacgctacctccaacgtacaaccatacaacatattcatacccatacatatacataccaccaatacaaacatgttcaacttcaacttcttcaagtccgccccggccaacgagcccaccgctgaaagctggaatcccaacaccatcaccatgcagcccaccagccctgctcccccttcagccaaccaaaacgtcgtctttgaacagcctgtatgttgatatcccataactaaacaagcccatcccaaaacataaactaatatcgccttagaccagccaagaacaaatgcagctgcgcggtggtggcggtctctgctgcggattgtacgtttctcttctatccctactaataaaactccaaactaacttaacccagctgcgccggtctcgcttgcttcgagtgctgtgagatttgctgctagacgatggaataagatgagatcgggatgtggccgccgatgcgctcgtgcgacaacaatgttgatggactcggccttgttgggtccttaagcgcgtggcctcggcggtctttgatgtgatgcgatgcgatttgatgcgatttgatttgatggactccccccccccctccccccccnnnnnnnnnnnnnnnnnnnnnnnnnnnnnnnnnnnnnnnnnnnnnnnnnnnnnnnnnnnnnnnnnnnnnnnnnnnnnnnnnnnnnnnnnnnnnnnnnnnnnnnnnnnnnnnnnnnnnnnnnnnnnnnnnnnnnnnnnnnnnnnnnnnnnnnnnnnnnnnnnnnnnnnnnnnnnnnnnnnnnnnnnnnnnnnnnnnnnnnnnnnnnnnnnnnnnnnnnnnnnnnnnnnnnnnnnnnnnnnnnnnnnnnnnnnnnnnnnnnnnnnngtgggttttttgggttttgttttgtgtggggcccccccccccccccccctttttttttgcgctctactggatctttctacgctataccccagaacaatgccagttatggagttcaatttcagatttacggttcgatttgattttggtatatgtagatgatcgttctggtcatggctcgtggtgtagtcgttatatccatggaaggatgggtcgcttgttagtccgtgtgttggctaggtaaaggggcgacgggagaccgctgatcgcaatgccgcatcgacgtccgatactcggaaacccggtgcgcggccgaggattcggaggtttgcgagaagtactgggttcgtgtcagtgatattgaaaagacacagcaaacatatcgggtaactcacagtcaaagaaacactcaatgtccagagtatacgacgacgaggtcgaggatactgactccatattaccaggagagatcccaggcgaagcatagagactggaaacagtcgaccgatccggcgaaaagccatacaaagccccaaccagactctccggaacactgagcctcaatgccgacccatcaagcactacaccccgatgctctaaataaccctgcacatcatggcaatcaaaccactccccgtccagatccaacgagcgaatcctctcctcctcactcatctgcaccacccctccctccaaagcaacagcaacaggctccctctccccactccaatcctcatcccaatcctggatcccgccccgctgcaaaatccgcaccatccgccgcaggattttcccaggtctccggctattctccgggtcgacggggttcccatccccgtccctgcgcgggaagtgcttccccgcgccgccgagcgtgtagaacggcatcttggcgaattccagcacgctcccgatctcggattgcaccgtgcgtcggtaatggcggcggatgccggccatgtcgtggatgcagggcacgagcccgaaaacgcggcttagcaacgcgggctcggtgcgcgggtctgttagccagcggtaagtgtgctccaagctgaatctgtgcaggcggcgggagaggttggattcttggtggctgtatgtgtagattgttgctgttgggaggatgcggtttattagtggggatggggagcgggctcggttgtatgctgggtatgaagagggggtgccggggctcttctggggacgtgtataagatagttcgtagccgaatatggccttgtctcttgatggagcgttagtttgctggagttggagatcattgtcgttttcggatgtctgtcgggtcttgtttatttctgctagaatgagttctcgtgtgcgagcgagatagtccacgcttggctggagtgtcggttcttcgttgaggcgatcgactgcctcgtggtgggctccgcctaggagatttgatacattctctagtgtctgctctagtgcattgacgcgagatctgagagtctggatggtagtctcctttttgagacgataggtgcgttgtgcccgtcggatctgcagacggcgttcctgtggagctggtcaacggtgtctctatcgcaggcccattggatctacctcaatagcagtggcgtctttggcctgtgatcgcggccggcctctcttccgcacgggacgatccggaccagccgagattttatccgtcgcttggtcgggaatcttcggtggttgggctgctttcgttcggggtcttagccggctagacctggtgtttgttggagtttcctgttcttgtgacagttccaggtaggatcttgacgatagcgtgtccatcacgggtgcctatagttttgatttggaatatatctcgcagtcgaattgtccagatgatcagagaggaccgatatccaaaccctggatccagcctggaggttgacgttgattgcaattaattgatcactcatcctcgggaataacctcggccttaagccaacgctaatgcgcccacaggggttctccaccagccttgcagatatttgtttgcccatctccgacagagtgcaaagtaccctaaggctatgcacatcatctacagggatgttatgaaattatctcgagttgtgcacgtcgtcgacgtcacacggaaacccgttattttatttcgacacacagacctccatcgcttctcccggaccgcataacgtccggtgatacagtcagactccagaggaacctgaaatccgcggattttccttagggcctttccggtaacagtggagaataacacggtgactacaaggaccaaagacacaggtagcagctccgagatccagatcgtgctgaaattgtcagcgtggcgatcgaaaatgacatccaccacaactgcgattggctcttgacctttagctttgtgacgatcatgtcttattcttgccccggagggttttcctcatttatgcttcgacccgaggccgtgggattattataaaaccacttgatttctgcctggaacacctctgaaaatttctttcaaaccaaggccatggctctgtcgtttgtcttgggctttgcggccgcagccgttgtgctgcaggtcatccgcatggtattcaactcatggcagcactcacgacatgctaagagcttgggttgtggcagtgtgccaatgttcccgtctaaagatccttttggaatcgataacctgaaacagtccctggtagcagacaaggccaaagtagtacctcagttgtccgaggagcgggtcaagatcattagtgatcaggagaaacgcgatgtcactacattctccatctgcaacctcggtcgcacccacatctttactatcgaccctaagaacatccaggctgttctggctacacagttcaaggacttcgagcttggttctgtccgtcgaattagcttacatccgctactgggaagtggtattgtgagtacctgctgtacctcatttatcctatctgcaacccgtattgactgtctatagttcaccgccgatggagaggaatggagccgatcccgtagcctacttcgacctcagttcacccgcgagcagatcagtcaattggacttggaagaggagcatgtgcaaaaggccatgcaggctctgtccgtcgcggacaacggatggaccgccgctaccgacatccagactatcttcttccgcctgaccatcgactccgccacagaattcctattcggcgaaagtgtcgagagccagctcggcgctctaaacggcctgaacagacccgaagactccttcgccagctacttcgacaagtcccaatgggtctgcgcgcagcgaagccgcttcgagaaacttgccttcctcgccgagaacaaagaaaccaggttctccgacaagcaagtgcactccttcgtcgacaaagtcgtctcaaacgccctggcagcctcccaagccgaaaagaacgcctcgcccgagaaatcctcctacgtcttcctcgaagccctcctagaagtaacccgcgatccaatcgagctccgctcccaactccttaacatcctccttgccggccgcgacacaaccgcctccctcctaagctggacaaccctcatgctagcccaccacccagaggtcttctccaaactccgcgaaaccatcatctccaacttcggcacctactccaacccccagaacatcaccttcgccaacctgaaatcctgccagtacctgcagcacgtgatgaacgaagtgctacgcctgtaccccgtcgtccccttcaaccgccgcaacgcagtccgcgacacgaccatcccgcgcggcggcggtccgaacggccaggaccccgtgtacatccgcaagggccagtcggtgatctactcgacgcatgttatgcagcgccgtaaggacctgtggggccctgacgccgacgagttcaagcctgatcgctgggtaagccgccggcctgggtgggagtatatcccgttcaatggtgggccgcggatctgtattgggcagcagtttgcgctgactgaggctgggtatgttattgtgaggcttttgcagcgctttgatcgtattgagaatgtttatcccgatcagaagattcgctatggtcttactttgactagtgcgcctgctgatctggttactgtgcgcttgcaccaggctgaggatgcttgaggggatgttggttcgttgcctttttatctgtccctatggtatttttcttttcttcgtttctagggatggttgatggtgcttgtgttttctttctgcggttatttggtctagttgggttttgccggctaagactgagatcggcttgaaaatttgtatatatctcttccacactggctgagtcactctgagcggtttgtgcctatatgacgagaatgacatatttgcctaggtatgaatatagttcttattattttgaattgtgtttcctgttgcgtgtaatatgaggaaacaattggcactgggaagttcatcaaatcagatgcaaggttgatcttagcactgaccgcaagtaaagcaggttctatacctaggtataggaagaacacacacagtatttcaacacatcagaattgaatttagataataagatcgaagtaaatcgagaagaaagtaatgtaataaaatacatggagtatgaataacagtcaaccccgcaagaaaacgcttacaccaaaccaccagtcaaaaaatctccccttttggcttgatccacacgagatcatcccttaaagacactgggaatagtaagggttctgcttgacgcaagtggtgccgctctcgcaagcagtggcgccggtccagttgatgccaccgcactggtaatagtgcttagcaatgttcacagtagaggagccgctggtaggtacctgagcatatgccgtagcggtcgtggtggaggtggcggcggtggtggtcgaggtcacggtggaggtgagggtgacgagggtggacgggacgacaaccgtggtggtggtcgtgggagctgacgctgcgggagctgtggtggtcgaggaagacgaggtcaccgaggtggggacctgggcggcagcggtagtggtgctggacgtctgggcagcggtggtggtggatgtctgaacggcgttcttggtggatgtagatgtctgcgcagtggtagtagcggatgtctgagcggcggtcttagtagaggatgtctgggcagcggtggtggaggtggatgaagaagaggaagacgaggaggtcacggctgaggcagtgccgtccacgaagtacttctcgaggatgggcaggtaagtcgcgtaagcagggccattgctgggctccaagttgtacatgtaagatccccaccagggaccggcagaccaccacgaggcgccgacccagacgtcgctgttgtcggacatgtaggagagcatgccctcgacggcagtctcgcagtcgctgttgacgccaccggcgaactcgccgatgaagcccttcttgttgttgtcctgcaaccaggtggtggcggactcgagacgctccttaccgatggtggtgctgacacaggtctcggaggtaccggagctgtcgctgtccaggtactggtgcatctcgtagacgatcttgtccgcggagtcggtaagggccttcaggttgtcgttggtggcgacccaggaataggcgccgctccatgcgttaccttcaacgaagatgtactggctggtggcaccagcggcacggatagcgttaatagcggcctggttcaggtccagaacgagagtctgatcaaggccgtggtactcgttgtctaaatgatattagtggattattaccatggtatgggtgcctctaggtgacttactggtatcgaagatgaccttctcgttagtggcgaactcagcagcaacggtcttccagaaggcgccgaaatcagaggtcgaggtgatgatattgccagagctgtaaatgagcaattagtatcatacatcacggtgggttctagtttgatacacttactatcttccgtagttgtgggggtcaatgatggcataggcaccgctgtcggtaatgaactggacagtctacataatagaactgttagatctggaagagaatcaactacgacagacatcacgtacagtcttaagagcggccaggtaagtagcatccgcggtgccggtcatgctggatggcaccaggcgctccatcaagaagggcacacggaagatgttcatgcccgcatctcgcaggatctgaatctgatcagtcttgggccaggtgtagtctgtgttcagagtaccggggatgctgcccgaggcaaattcagcaccggactcgttcacgccgacccaagtgaatccattggcgcgcttcttgatattagcgctctgcctggtaggaacaacgtctcttgttcgggggtatgcgcaggccacagttgcggcgctggcagccaggacaatgttagtgaacttcattgtaggttgggaaatgtaaaagagagtgagtgtcgagtttgacggtaaagaatgtgaatagaagtaaaagaatgaaaatcaagagaccagtcttgaagcttgaatgaaagataatgaatgtactgcacgaagcaagggtgaaactcgtgggggtcgtctgttatatagccataacctgctcgggggcgtcaaatggcgctttgtgtacaaagatactaacaggcattctagagtggattcattcttcggcttaattagaccgtgataccggaagcgctaaccctgagggctgcaggagatgtctgttctgaacggcgggtctctccaccaaagtggccggataatttctcagaagccactagttcgagcacaagggaccaggagcgatccataaggcatttcgatgttatccataatcaacccaatctgtcgggaattggcaggcaacgcctaaccgcataggattgcacggagtatgtggaggcgggatcactaaagggcgcaaagtcggatcggcttccatttcgcttagactcgtctccccctcgaaagagagtgcaattaaaacgagacagttctgatacacttccggattagctaacccgccttgagcgtagtggcggaaaataaggcgccggataaaatgagggctgcctcaagatgaaacagacaccatgtggtaatttgggttgaccctgagatccccggtataatttgcccggaagctccttagcggagaggctaagaagcgaagctcatatatcgaagcgagactatccacatttcggtagtcgcggacacgactacccggacaagatatgttggtgttgtatgttgtatgttgtgttgtctgctcactcctgtcgatgctaatataaccgtcgtcacgtagtactataactagcttttcaaccgtactttgcagccgcctctaatctcttatggtttagacttggatgcaaataaattagacctgatgttccaatttattttctaattcatcaggaaagttacaggagttatgctcttttgtgaccagcagtgccggcagtatataaggggtacccttggcgaaaaccaactgtacatgttaagatgagatcgatcgtcgagaacgtttcatacttcgatccaattgatagaaatcgagtgaattgtaccatttcatctccgtgcacgtatctcaggcaaaaaagggtcccaaatatgtcagtagaaacaacatataaagtagtcaatgtataaaaaggcagggacaatgtattgatctttaatgctctatttgactgctatctttttttccctctcctatgaaacgagagggtacaaagtcagaggctatcaagaggagccctacgattcgaaatgttcgcgttacatgggattcgaacaccaacacgtgggcacgtgacttcccaaaagcgtaattctacgagagaatggtagaaacgcgcgcaccctgtagccctaataaaggatctgtaaaagaaaaaaaaaataggtagcttctctttgattgagcgtgtcatccttagtgcaggggccatgctaatcttctctgtatattttcatttgaccatatgccccgaagggcgaatagatatccttaaagttcaatataacctccattttgggcaaaaaactaccgcctacttattttgtcaaagcatcctacaggctttgattggatggctacaggtggcttgtcacgtgaaatggtaggctcggattgcatccattagttaatgagttaagtgattaccgatgagttatgaggtctaagcatgtccccaagcatagacgaagctactctgtgatgttaaattcaaatgaataatcaccttgaccgatcggcacaggcttcgcgtcattgtcatacagcgtcctttcaaaatatcgcacccgtccatccggtcgtgccaggagaacagtttgtttctgtgtcccgtatgatccacaggtaaaactctggttcggggccccatttgccggggtgtagatctcatcctgtacctgcgctgcagcgatatcctctgcatcttgatcaggatcatttggagtaccgatgcgcggaacgaagatggtcttgtgcagatgttgaatgtatgtctcaattgtggcctccttctctggcagtcgtggcaggcgatcagtgctgaggacctgcagcagacgatcaatcaatgcatcctcgtcctccgcgtctcccttttgcacatgctcattaatagcagcctccatcaactgctctccattaataatcttgggccaggatctgtcatcaaagcttgtgttgctgagcccacgtgtctggttcttctccgttgccacccaagtgatctgatccatgtctgtggaacggttggagacaatggccaagggctcgttgatacgtccacacaccagactgaaaccccccacctgtcttacttctgggttggccacgatgctttgcacaaactcttcggtatcatcccgcttgtcggtggacccgatcaaccagttgttgacgatggcgccccggctgtagattccgatggctgcgctggtggagtcctcacggtagttggtaagaactgccacctttccctgcctggtgacccccatccaagtgccttgtgtaggtcgggctaggtctcgtgagccgaggacatgtgaggatggccttagccaccagcctggcgaagatgttggacgatggaggaattcctatatatggtaagcttgtggttcaccgcttagagtggcaatacttacatctctgttgttgattatgatcaacgagtatttcgggtgggaagttgagattaatgcgatacacatagtttgagtttccgaggtcctagttgaacgggcggggaaaagaggattcacgaatttaacaacggtgtgtataagatggagtagaagcaaaggttctagcgaaacaggaaatcctggaagagaaagaggaacgggccataacacgtaggaactaaggcatctcgggtgattgggccactcgttgcttgtgcctcgggcttgtccctcgtgtagcgtatgcacctaagtcttggagtcttaaaaagccctcaaatatggcaagatatatattgtctcaaaacacatgaatgactgaattattatggcacctcaaaagcaaaaagtgtttcgcgtgacgtcaacacacatccgttgattcttggggaaatgcaagcggtcacgtctgtcatggagttatcgtgaagtgatttgcgcgtactattaatatagttatagttatagttattcttctttgattctgctttcaagcatcggataccctaaattatctttgttgccttattctcctcttttttgtccgacttcaggcgttagtctcagatcagcggggctgaagacttaaatatccccagtgactttcttttttcacatcttcaattcacccaggcttcatcatgtttggaatctttgcggacttattgtcgtaagttcaaagcatatacctcggaaagaagagatccgtaagctaacgcatagctatctgatagctcggtcatcacgatcctcttccccgtctttgcttcctacaaggctctccgttcctctgacccctcgcaactcgcaccatggctgatgtactgggtggtgctctcagtcattctgctggctgaatcctggacattttttattattggatggtatagttcaaccccgctccggctcaagatcacaagctaatgactcaattatctaggttcccattctacagctggatccgcctcggtttcatgtcttatctcgttcttccccagacgcaaggggctcgcttactgtaccaagactacgtggatccgttcttgacacaccatgagcgggggatcgaagagatgatcggccgcacccatgagcgggccaaggcactgggtcttcaatacttctacaaggccatcgactttgtccggcagagggtcctgggtctacctccgcagcgcccgacaccccctcagccaggtgccgcttcctacgcgcagtcgctactatcgcggttcaacatccccgtcgcaggaggagctggggcgcccgccaacacaactgattggtactctcttttcagtgcggctgtgggctcagttaccactggcaagtctcgggaagtgcgggatgaggagctttccgccagtggcactctcctccagcgccagctgcagtctatgtctggaaccgagaaggctcaatttatttcctcgcagcgagaggtgctagattaccttcggtcaactctaacacaagaggagcagagcactcctcgtggtgggctcgaggctgatgaccttgcctatggcgtgccgttgcgcaagaatcgcagcgaaaactccttcgaggttgttgatgcggatctaggaagtcgcccggaacaaaagactagtggatggacatctggttggttcggcaacgagcaagattcctcgggctcatctggtactgacttcgctgcacgggctgtcgatgagattgcccgatcgcgcacaaccgggcacgaccgatcttgagagtctgaccgcggagaatgtcccgcttttcaacaggggtccagatagaataagaaaaccaaaatagaacttgaacactttgctcttgctgagagatagggatgggagacatgatagatgtttccgggttgttttctgccttgctaaaaaatagttgaattgaaacttgaatcgaaagctcaaataccactaagaacagccgaggatgtcaagccgaatccctccggtcggaggaatagccttgcatggaagagttcacgcagatgcactgcaaggacggggacggggagacggggaagtatttgatatatccctatgcttggtgtgttgagtcaggggtgcataggaataagataggagatctaataggatctgcgagatatacagagcatagtccgttatgtatctaaagtaccttgtatagttcgatgtagatgtacttcgtcgatgtagatataggatgggtcaatagtggcaaatggggcagatggggcagatgggggcatgtagagggtccagaggaagaaagaaacacccagagtcattcacgagaagagtcatgtctagtattgaaccctatagcccatatgatatgcgttgaggccgtgtagatactatctatactcatgtactaacccatgtagatctctttgtaacatgtgggtggcgttgtagacgttattctcgaccttttccacattgctctcacttttcttttgaacatttcatcaagaccttttttctagagattctcacgagaatccatcccataaaacacattcacatccaaaggtacgttggtcgagccgggacgcactctcgttctgccctttcgttttccacaaacccgaatatttttttcccgtgaattttttccctcccaccaaccttctaccctttgaaataaccctttaacacataacactgtcgaccaaaacgctgctcttgctgcgtacctggtcttctgtgtcactggaaactcgctttccttatttcaaatcaagtttcatccctttaacaacctgcagctaggtttggatgtggccttgttacgcctccgcgtactgacatcacctcgtctttttttctctctctcacctgcctccatcgcccttttcgccctctccgcgcgtttagacgtacaacctgtctaatgagctcgaaccctcctcagtcgggcaaccaaggacaaagcaccgctactcccgtcgcttcgacccagcccgcatcctctacccccctggctgcccaggcgccagccagatcttacgccaacgcaactaagaagtccgcgacggactcaaccgccgtacccgtcaccgtgggcggttcagcgcaacatgggcagtcgagctccgtatctgtgaacggcaaacccatgcaaaagcaatctcaacagtctgcctcttctggcgtgaccatcgtcaatggagccccctctgcttcggctgcttcctccggggaccactctcgcaagccatctgtgaccatcacctcgagcgggacctccggctacatgcccaacggcggtggcccggccagtcggcccaacagccttcagttcggattccagcagagttctcccaacatgggtgctcccgctgtgcccgcctccaaccagcaagctggacttggtgctccttccacaaacccgcggattacgtctcctcagacttctccctcgcctattccccagcccgcatccagcggcggccgcccacctccatcgacttaccaggcacaaggaaatgtgcccaacttcggtagcttcggagaatcggctgatgctaacgtaagtgtctctgctccttccctcttgagtgatcccggtgtacacagcgtgacaccacccgtgcgcgaccttttcaagtccttgttttcgtgttttcgacctggttttgctcacatagatgtgttcgatttcacaggcacacggtgctcagcacttgcgtcgcgagtcctcccaatccacccacagcgatatgagcaaccacatgggcaaccgctcaagctaccaaggcggtcgcggtcgcggatactcccagcccggctaccagggacagcagatgccctactcccctaaccccggtttccgacagacccccaatcagccgcgaggcggtcctaacatgggtccccagtttcacggctcgaaccagggccgtcctttggccccctacccgaactcgcctcaccaagccaaccgcagccctgccttggccaatgttaaccctaccactccccagatgaaccaggttccgatggcacacccccagatgcctcagcaaccgtatggttacggtcaacacatgggcccccaagctgtgagatcccccccttctcgttcttcccaggacccctggcgtcgtccccaaaggaacctttccagctcttggaggcgcaaagacaaccctacatactctcccgagtgccccgtggaccttgcgcctgaaagtggccagttcgaacagattctaacattggtcaaatttcaacagtcattccccaacacatacgatcccaactacgctggttactacaacccgaatggtggttactacatgggacccccgtccccccaacctcgtactgccggcatgccctacaatcctcagtacatgggacaacagttccctaaccccatgcctcaggcgacgccactttcgcgtaccccctctcaagtatctactgatcgtccaggttcgagcctcggtcagggaccggcagccactggccctgctgtcgccggccacacccacactggcagccgcgcatccaacagccccgctcccaagcctcacttcattattccctcggcgaagaagagcccaatcatcatcaaggaccctaacagcggctcagtcaagaccttcgaaaagaaccccgcctcccctgctcgtgccaccccttcgcccgtgaagctcactcctcctacatccaccccccctcctcgcactggcagcgcgtctgagcacactcgtaccgagaacaaggtgaagaccgatgaagagaagaagcaagagttgaaggatgccgttcgcctgaagatccagcaggacgaagctgctcaaaagcagcgtctggctgatgaggcttctcgcaagaccgctgaagctgcgccggctgctgccaagaaggatgatactgaatctgcccgggctgctattgaagatcttagcattaaagataaggccgctcccgtcgaggaacccaagaaggtggaggctgctacagaatcaaaggctgctgcccctgctgaagagcccaagaaggctcctgctcctgcccctgcccctgcccctgcccctgcccctgcggatgatgatgagatcgactttgatgccatcgagcgtgaaatggccgagattgaagccaaggagcgcgccgccgaggaagactacaaccgcgcaaagcaagctaaaaaggaagaagccgaacgcaaggagcgtgaggaacttgagaactacgaggccaacatgaagaaggccgaagctgaggccgaggctcgcgaggttgcccgcgagaacgccgcccgtgtcggtggtgaagcggccgccaaggaagacgccaaggatgcgtttgcctcgctcaagaagggtggctacactgccactgagtcttctacgcctgccgacagcggtgctgccactcctgtttcgtccgacatgggtcccccagccaagcctgccagtgctattcctaagaagcccgttggtctcaagcttgatacccccaagcccaccgagcccctgcaagcaaccgcaggcatgaagtctttgcagaatgccaagttcctgaaagacctcagcaagatcacttacccctcgtccatcacccctcccagcgccgctatgaacgctgctgcgcccgaaggccgcaagttccactacgaccgggacttcctgctgcaattccaggccgcctttaaggacaagatttccttagattgggacgcccgtctgcgggacacagtcggtgacccatctggatcccagtctgcccgcactcctggcttaggtagccgcggtccctctcgcaacggcaccatgggtcctactaccttccccgtcatgggcaacttcaacacaggccgacctggccagatgcccgctatgggcagcggatcactgaccggccgcagcgcgtccgcctttccatttggacggggcggcggtcctggtagcatggctattggaaacattcgccaaaactctgccggtgttcctcctcgtggcaactcaagcaagggtccccgcaacgacagccgacagaataagaataagcacggcggccgacaggatgaggcacaaaacaaatcgatgcctcttaccgctggcatggatctgaaggctattcaaaccaccgcgactggctggaagcctcgcagtgttggccaaaacgctggcgctggtcccgcccctggtggtgacggctacttggcaccggatgtcgtgcagcgcaaggtcaaggctgctcttaacaagatgaccccggagaagtttgaccgtatctctggtcagatcctcgagattgtttcccagtccaaggatgagtccgacggccgcaccctgcgccaggtcatccaactcacatttgagaaggctactgatgaggctcactgggctcccatgtacgccaagttctgtaagagcatgctggagagcatgagcccagaaattaaggatgagaacattcgtgacagaaatggcacagtcgttgctggtggaagtttgttccgcaagtacctgctcaaccgctgccaagaagagttcgagcgtggctggaagactaacctgcctaacaagcctgagggcactactgaagaggtatgtcgttctacatctcaacgttatttttcccgtatactaataaccgaccacaggttgcaatgatgtctgaagaatactacatcgctgccgccgctaagcgtcgtggtcttggtctcgtcaagttcattggtgaactttacaagcttggcatgcttacagagcgtatcatgcacgagtgtgttaagaagcttgtggactatgagggtattcccgatgaagccgaggtcgagagtttgaccagtctgctgcgcaccatcggtgccagcctcgatgcctctgagaagggtcctgccatgatggacgcctactttactcgtatcaacctgatggttgagacacctaatctgcccagccgtcttcgtttcatgcttctagtaagtttatctctatctcttcgtcttatgagggggaaatagaagactaacatggttcttaggatattattgatctgcgtgccgcacgctggaactctaaggatgccgataagggtcctcagaccattgttgagatccgtgaggctgtaagtaacctttattgctatgttccaatgtctctcgctaactcttgaaacaggctgcccgtgcccagcaagctgctgaagctgagcgccagcgccagtccagcaaccgtggaggcggtggccgcatccccatgggtcgcggtgacgcccgcggtttcggatacggaaaccaagcccctcctcccgattatgcctctagcaaggttggcaccgacgatctccgccgcctgcgttcgactcgcaacaccaaccagcctatgtcattcggtccatccagcctactcggctcgcgtaccaacagcggccgcaagaacctcggtcccggtggtagcctggtccgtggtagtgacgacagcgctgccagcagccgcaacggcactagcggcagcaagaaggaagacaactcttctatgaatgctttcaggtatgcaacccctaacccttccctgcaaaaatcctcatgctaataccctttccagtgcgcttgctgcccttgaagatcgggataacatggctacctcgccaccgtcaaaccctgcatccccgatgctcactaagtcgcagcccgcggcagcggagcgtcgtccctcaaaaaccccgtctgtcaaggacggagaatccacagcatagagagtccttaggagttaatgatcaacgctttccattttcttggttcacaaaaagatttcctcattttcgtcatgtccatcttgttctttccccgtgagggaagccatgcgcctttgttcttaatcggtcacagtcctcgctttgcattttccgactggtcggttatcccctaggacttgtttttcacgctttatcacggccggtttttacttttttgaacttctttcgaaaaagagacccaattcatagtgtacaatcttgacatctttttcaattcttattcttgtttcttattcttgctttctccttcttttctttccattgaatcgagagatgggtgtggtccgtggggctgtgcttgagagtaggactttgctttgcaattggacttgctcaatcacttctatttcataattcttgtctttcttttgttccccatatgcaactcgcgtaggggtgggaactgacaagagattgatgatgacagtgatgaaggggttgctgtgttgctctcttttcctcttcctcctttcttgtgctttgcatattctcttcgctcttgttatttgctcttgcactttgcttgtccttgtcctcgtccttttttcccaatacccggagctccactcaactttagtgtaattgaatgaatgcttcgccttctggctctttctaatctcttcctttatgactattgagctactcgtagagttctgtattagacgtgactatagacttggaattttcaacaaacaatatagcatggatcggtgcctatacttacttgggtatactacgatgagaatagtcggccgcttatgttgttggtgtctttatgtctttatcaacaattctcccgtgttggtattgtagaaggataagaagaagaatcatccgcaaagaatagaatatccgcagtgaacaaagtgtaaagtatgaatattgactacgagtacacaggtagtttacaagaaatctgcacatctatgggattaagcaatcaatgtctatgcatccatttagcgaattcaggctgtaggcacaagagggagagaaatccacatggccagaacatgtgccctgtctaaccaggtcggaacatatcttaaaaaccataagtgatgagggtattgagctgaggtataactgtcagtcccgtcgcgagccgacgtggttcctgacgttcattattctgttcgagagagaggcgctagaagtagcaagggatggttcgtatgcatcgtgggtatctgagaaagcgcgatgatgtaatgtatggcgccaacacgagcgaaatgggagaaatggggataaagagccgccgcggagcaagcaatgctgtcaggattcagatcccttcttgttgtcgtcttcatcgttgttctctgacacttcaatcatcgggattgacacgggattcttgcttgaatcggaaggctcatcctcctctggcttgtcagcctcgggagcggggtctggcacaggagactcgagttgatcggatggagtaggtgaggccacggtgctctctagcaaaggagatggctgggcactactgccagcaatgacgctctcctgggagctatctgctgaacttgcaacacccggactcgccataaccactgcatccagtgagttccgaataggataagttgagtcggagtcatcgtggctaacgctactacggtctgagaccgacaaagaactgcgcgaggccgtattcgagtatgatgcagggagtccgagtgcctctgccactgctgcctcctcgtctggcagcttcgaagtgctgctatcgttgctagcactggcgccgaatatctgactgccgcgctgttcgctcatttccaggatatggttgtagctgcgtcgtgttgggtctgcacggcgctttttcttcttcttttcgcgcttcgttgaaggccgaacgactatcaccgggatgggggattgctggagacagtatttggagacggagcctgggagcagactgtgcactcctttcaagttgcgtcctcgtgtaccgacgacaagcattgcaggctcgtatatgcggatctagagattgttagattgttaggaggcaacaacggggttcttggaagcttaccatgcgttggaggatgctctcaaccttgcccacggcaagttccaggaccaaactgatggccttctcattctggctgttcttccgaatcacctgctcaaatagcttctcggcctcttcgcggtactttcgctcttcgattccagcgtcgctggctatgctcgagtccttctccaccgcccgaagacagacgatctcgtcgccgtcatccaccagctcgtcaatgagccattcgagggcgaactcggagtagtcgttctggtccgttccgcacaaaaaggtcctgctacgacgcgtgcactggtagcctttgtgtttgtagtttaatgtgagggagaagtcggtcgcatcgaaattgtcgaacgtgtcaaaagagacgcctcgctcgtaggttctgccatacattagtacaggccatttcagtgtctttgaggggagcatacttcggtggcggtggagacggccctcgattcaattgggcagctttatgttcgcgttccttttcctccaatagttccctcgacggggtatccccgtatgacagtcgcttctccttgaagctcgacgggcgactaggcaactgagcctctgcaatgctaaactggatcgatctccgttggttcttgggcttatcctcactagagaggccacgggtgtgaccagacccagctgagatcgtatgatctccgagttcaggtcgctctacagactcagatgagactgtaggagaagttggcgcagacatcaggaagttgatctttggtgatgtaaaggaacaggggtataataggtctgtctattggtttgcgtgggtcgtgtgttgacgtaaatgacgaaagaccagtacgtatcagcggccgcgcggttgttgggggttccacaggaccaagcagggttttgggatcatgttttggagttcttgcaatataaattaggaaggttgatcatcacgagtcatcgtgctcgcgcggaatgacggatgcagcgaggggtcaaccgtcagggcggttcagggcggtgatcatttatcgatagcgggagccctgcccgcgagcttcattgtgcttatgtaatgccagcttgggtccacacaggcacgtgtccacgggtccggtgattgacataaccctataatgactgaagcttcatttgtgttaactacgtggggatgccaaagaggcgatatttagtgcccagtatttctttccaaagcctcagctgtcgagtagagcttgaagaaaacttgtccacgtgtttataaagggaaattctcaatcgcggcagctttaacaatctgtatgattctcagctgttttacgattggagatgatttctgggggttttgactcttgtgacatgatgagcgtgccatgaacctttttgctttctttttttcttcagagctaaggttgtttcacatgagaaagggatggccgcaacacaaacaaagaccaatggttcgttatatcattgggaagcatgataaagttcagagttgaagtgagcaatatatgtagctgaatgatctaaataatccgaactacaatggtatcaatctaattttccgtgctccgtacaaagaccagatctgttagggcataaagataaaggaccaacctactatattaagtaaattccatagcaatcatactccatacgtgatataccccattcccgccacccgtagacttccaaggtcctgatacgaaagctgactaatttcaatctcagggtcttaccagcacctaaactgccagataacggaaagtgctgccagataggggaagaagatctattgagcgcccaaccaataaaagcgcccaacagcggagcatacccgaaacacccccagcctcaagattcccacccactagcccaatctgactccccctgccttacctctaacaaagccaagggacccattcgaagcaaaaagaagcgatggaaaaaaaaaaacgagacaagacccagccccttcgtaacccactcccgtggagaacatggcctgaataatgagctagtaaaatccttcagctgactagcaacctgtcgcagcgccctatgccgacctagccgcgatgatctcacgtcttggctctgatctatctctcttatccggcggtgaagatcatggcgtgctggccggctgccacttctatttggctggaaacggattcggcgcgctcggggcgtggatcgacgtggtcacatgcgcgattctgccggttttggggatttgctgtgctacgacgaaggtacgcaatatggagattaagggagtacgtggaactggtacgtggaaaatgttgaggattttggaatttttattggattattttttttttttttgtgggggaagtgaagacacttggtttgtgtgtacattggttgggctcacaatggcttcccccgtgtttcaacgatccaatgcagtctcgacctttccagggagagctggaggttgggccactatcacagatagctggggatgtaagaaaaatataataaatgtccatgtgacatacaatgagatgtccaaagatggagattcgccaaaacgcgaccgacagaaaacgccagaaaatagaaaatagatgagatgtcaattataaattcgctccaaaaagtatcgtcatagaaagcatcagggtatcacgtatgtatcgctggatgatggtacacaaggcagagagaggggtagagatgagagtataagtcggggtcgtaacggagtggatatatgagggatcgagcttattcaataagcctcgatgatggtctgctcttgtgcaccaaaataccccccctgctcaaagagatggggttgatcggaattcgccaaggtaatagccgtagtagtaggctccttttcatgaaacgactccagcgtcggctggnnnnnnnnnnnnnnnnnnnnnnnnnnnnnnnnnnnnnnnnnnnnnnnnnnnnnnnnnnnnnnnnnnnnnnnnnnnnnnnnnnnnnnnnnnnnnnnnnnnnnnnnnnnnnnnnnnnnnnnnnnnnnnnnnnnnnnnnnnnnnnnnnnnnnnnnnnnnnnnnnnnnnnnnnnnnnnnnnnnnnnnnnnnnnnnnnnnnnnnnngcgggcgggggcggggaaggcggcgtcgcctcgtcctcggagtctccatccaagtcaacgaggagctcgggtggtgactgtcgggatgacgagcgagtcaagctcagctcgtccgaatcatctgcttcgtcgtactcaaagtctgagtctgtgtcatcgtcgtcgtcatcctcctctaggaggtcctcgaagtgagccacgggcgatggggcgcggcggcggggaggagtgttgatgatgaactcggactcgtcgtagtcggagtcgtcgctgagttcagagtccacatcggacgcatcctccggatcccagtcctcctcgggctcttcgaccacggtcgaggcccactggacatgttgccgagaggaaggagcaggggcagaagccttggtggctccgttgacggtctggttgaaccagcgttcttgttcacgctcagcgtcggcgagatcgtacattagtgagtcgaggaggttggcgtggccgacaagcagacgcaggtcgtggtccgcccgggaagcttcacgggtgagcttcttccgggcggtgtgagcaaggtagtatgtttgagtgatgctcattttcttatcttgacggcgacggaggagagaatcgaagtagggtgaggattcggaggatgggctgggggatttggaggtagaagaagagtccatggtgggccagacgagctttttcagggatattgggtatgactctttggtggtgactcaattaggcgtcatccagtcacagtggatcgttttgaggcggtgtgatataagggagaaagtcggtgttagattggattcggtatacatgaaagtatagacaggtcgagttgtgatttccaagggggaccagatcgatagtgtagcgggtttaaaaagggaatctcagatatcagaaacacctggacaagaggtttatatttaatctgacaaggcagcgttttctttttttcttttatttttttttagtccgatcgacccgatcgacccgaaacggactttacggatgacgagagatccaccggaaataaatggagaaaaggtatacgccgagcccgagtaaatgagtaatgcactggtcgcttccaaggttccctgggatttctagatcctcaccgctacgttacactttgtacgtatactttagatattgacagtaaatattgattagtattccgtgcttataattcaattcaaatctaattaactacgaaagttaatacagtgagtcatctaaagcggcactcggatggccaatacgccgttctggtccgcatcggaggatgaaaaaaccgatcggagtttcggtcgcacgtctgccgtttatttgatttgaattcttttccttaattcctaattcctaattcctaattccattatttcctattcgggctatatgtacctctgcgacctagtttaccaggtactctgttgattactgatataacaacaaggttcccatgatccttggaactcatatttgtattacagagcattcgatttctaatcctagcacgccaaatcatatcatcttcgatacgatctgacaattgctgacaattgctttgaccccgcgacgtgtcaacatcctatctagcatggaggctcttggaaccttggaagccaagccacattgctccgtatgcgtatcctgtgttatgcaacactacccctcgcctgtgttctgtccccctagacgagtacgacatgtgcccagccttggcaggatggagtagcattccccaggaattcgtgattgaccaggaatccatgtccgaggaggtacggagtacggagtagggctgtggggaacacacaggaggttctgactaatgattggcaagaattggcgcatctcattggtccccacacgaaatctgctcaccctgcgccctgcaaggagggggtgagattaggtgtttctcgcctcgcgatacaggcacaatgtacattccttactccgtccagcatacttggccctcatagcgtgtttggcgtatcgcacagactccaaccctgccaaggtaaggccctgtttttcagatggcagccttgggcttgtccaggcaggcgatcttggcggcttaggtaagatccatgcggatatcaccgagccaagatccgaatccacggatgcggctttctgatgacataagcactcaaatgccacctggcctggtggttcgctcgcagagcttacccttttaatctccacttgatatagccctacggactagccgaatacgaagatcccaatacatattgatctggcctgattgtttcattttaactctaggctgctcttatgtcttaggctaccatatcatgcaatcttttctcgattttccatcaatatcaatctactctgaaaattacccaattaggaaatggtgaggtcaacaggtcgatccagccacaggccagaacaattcaattcaaggtctatgttgtggggatggatcggagatcaatacaatagtcatcatcatacttttacttttattgaaacgccaataatcgacagcggatcctcggctttttgttgattctccgagatccactgtgcttgacgagtatcagagtatgacatcaaggacttgggcttcggcaatttcttatctgttatttattgccgagagatgattctttgatgtgtattagaagtggattgccaattgtctaggcagttgatatggttgagatggttgagatgatgtggacgacaacacattacatgtacaacggcctgatataatagtcaccaatcaaagtctagataaccacctgcctaaaataggtgacgtgtatcttgcggctgataatgatatgcataacatacgtgtgtatgcacataatctcatcttaataaccaattcacaatttatgcacacaatctccattaataaccagtgcataaacataaaattatcccacctaattaggtaatgtccctcgcaagcccctccaaggctggaggcgaccaaattcctccgatcctcggcaaaactccatccgcccaggcaaactccgtatccgagttccgtcccaggggtggatcgtgcactgtgcacaccttctataacatgcttccccaatgcacgtcgccagttcacgctagagctctctggctttgctcacgtcggctatcaccttcattcacgggtgatcgacacgtgcaaaagacgcatgtgactcgatctcgggactccgttgccggtgccggaatggatcttcgtccaccgctagatcgaggtttgctggctatacggcacatggccacggggctggccggatggaatggtccgtgtggattcactacattttgtacggagtaactagctaactagaggtcctcgcctcgtgactcatggctttttttttcttctagtccgtcatgcaggtcgcttagcgtgttcctcgctgccatggggattctcgtttaagggtccattcgagctgagctgtcggccgctcggatatagctcgggctttgttagttagttatttaattaatcatttatgattgtgcgctctgatcatcttcagcttgtaagcacgtgaattctagaacaaaaaaacacatacatgtccggaaaaggaataggatagcgaggtgggtaaggccaaagtcagggaaacaaattttcagggcgagatggacgctttgatcaatctctggcctctttgtgcctgtggagacacccgtttatcctttgatgtagggcagtcatggcacgtgacagcgatctatatctacatagccaggtcctacgtgaacatgaataccataggtatacagattacagagcactaaagtagaagaaaaacattcattcgtgagaactgacgaataggtgatagtcaagtgacgcctaagcaacgcctaagcgtcgcttcagcaacgactggacgagacatccagcgctgcttcggcgacgcttagacgccgcttaggcgccacaggccacagactcgagccggactcgaaccggactccagcgagccccagcgcttgcacattcaacagcaaggcgcatcccaccctcgccttcaagccttccaggcttctcactccaggtacacattctggaccatctcattgccgagatgatcgataacagagaccgaattgacggggtccatgatccggagatcagcataagcgagggcccggtcaacggtggcgtcaacgttgtacaagtcgctggcgtagccatggaagcgaagcttgtgaatagcggccttgatccaggtgacgcagttctggacaggctcagcccccttaatgggcagggggacagaacgaagaaggatcttgatggagtcggggccgactccatcgttgacctcgccgattgccatgcggatcaggagagagtcgcaggaggccgggtgaacgttgttcttgacgcggtaggtccattgataatcggggttgaggtcgcgtcggtacactgggtcgggcgaggctccgtcagtcacgtcgaaggcgtagtagcggttgtttggtgcatcgaagaggaggatggcccagtggtaagcagagaagcctaggcgtcgtcggtattcgccaagagagagctcgcctcggtggtagactgccaggaagacttggtagactctggtacctgggggactcagaatcgcgccacgctcgacgggagcatcgctgaactatgtgggtgctcttgttagttgctattctgagcttcagttttgatggatcagactcacaggaagttcaattggaaacattgccatgttgctcagaatttgcacggttgtgtgggatgggagatggatgagggtttgtttactggcttttctcaggtcgagcacttgagcgggcacatgagcgagcacctgagcaggaacccctctcagcttttatttccctttctggctaccgcctgaatgccattgtcaattgcaattgaatcgtcggtgcctaaccaagatgtctatctgagaccgccagcctattgatgattgtggcgaccagaaacggggatttattcgattttatatcgcgggtttatagatatctgaagctatacaaatgccggcgcacggaccatccgatatagatcgaagcggcccgtccccttcgatccaaccataaaagaccgaagctacgaatagtaaattagaccaatttggtagtttgattgattaaaacaaatgagcgacatgtaaaatagttatgtttcaatctaaaatgcgcactagctctaggtatgtggtggataggaccatggtctgatatttgcgacaccctggcacaaacatacaatcacactttgggattgtataaatgctggcaactctggttattgaaaagaagataatcacttgtattctttcaaatgttctaaaaccatgcatatagtgaacgagcgacacacaatccttttgtgaatatcctaggtgaccaaaacacagatagaagttggctgaatatattctcatgtcgtagaacagtaacctatgtacattggtctattttttaaattcaataataggaatgcgataagactttctttcagaattaaggtaactttctcgataagacatgggccagtctcgggctacatatagaaaagtcgctggtccttcctatacatctaaaagacatctcgagagaatatccgaaaacacatcgaagtgtttttacacatatataggagatacctaggtcgctgagctgtacaaacaatctgctcaaccatctcattgatatagacataaagagcaaaaataacaaaagagtagtctggacatagaatcatagagaaatcccaatgtcacgcctgcctgaaataacttggtacttgatgtcaaagtgatcagtacccggttttcaaatctgttaaacagactctgcccttatccacctaaggcagagacaagaacaaattcttcaacttgggatagttaggtgtgcccaatccagtaacgggatcccatctgcatagtacgtcagtaaaaagcccacagccaatatataatattgtactcaccctggaatagcgctgaagccgtccgagtcacatccagcactggtgccgttggtgatatcgttaagaacctccgggtgagcatagagcacagggttcacgaaaccaacagggcgcttgcccctggcaagccgttcttcgttgatctaccaagagcagatccattagcacagtcgaaaaacaaattcaaattcccgacttaccaaattcagaaccgaagcgaacaatggcgaggccaaactagcgccatagaagtggtgcagcgctccattggtgtaagcagggaacaaggcaccattggccgacacatcgggataagcacggccaatacggttgtagagacccttggtcttgttaaggttgacttcgaactcggaatagtaggggtaagtcagcttggccttcttgaagtacttctccacggctttcctctggtacaagggctgcgggaagtagttggagaagccgcccgagctgctgaagttggcggcggtaccacccaagttagcgtgcatcacgctttcggcatcgttgacggtctggtccgcgtagagcatggtgcctccgacggaggtcacgtaggggcagttggaggggtattgggggttgaagatctttccctcgggtcccaggcatccattggcacttccgtcgccgtggaaggaggcgactccgtagtcgccagaggcgactccgtagtcgccagaggcgaataggatggagtggccctgcaggccgagcttcaggaactcattgcattggcgcttggtgtatgcgacggggagatcggcttcggcttgtccgtaggaggcgctgatgacgtttgtgggcttgtacacaccgcattgaagcttgcctgtcttgtgtgagccatcagatcagtccgtttggtggaaattgtatattacccttgtagccaccaggttggggattgggatagactgcgtcgatatcagggttgtcgcccttttcaccgaaggcactgtatgtgcagtaagactgaaattattagcaatatgcatttatcttcagcagaatatgacatacaccatcgagagcgtcaaggaaagtgttgaacaggttggtggtcgcaacctcttgcggttcatagatttggtcatcaacctggtaaagagtcacggactgggggtagataagggcataactggcgatattagcaaataacagagaagcaagtagaaaagaactgtacttacgccatgtcaatatcaatatccgattcaccagtattcagcgggctgtaatcaggcaccgagaagttggcaccatcaatcaaggcaggaatggggtaagtgccttgagggatccaaggagcataggctttgtagtacagatcaatatctgacttggcaaagtagtcaccctgctcgtagagaccaagcgagttgcccttctttgccttggtggcatttggaatcttgtacaaggccttgatgcaggctggagtcatattggttccgcatgtctggagatccgcaggaagtgacttcgccttctcggggataaccgtgtcgatagagtcatcaattcccacgggcgtgcccttggaatgaaccaaatgcgacgctcgcttctccttggtggtcttcttgacgatggggctgagcttgacacccggagtaatatagtcaatgtgtgcctggatatgttcagggacgtggtacctaacactgttaaaagagtccaagatggtcagaagcagcaaaactcactcctcacaaccaatcttgatgctggaactgctggcatgctcatgttcatagaactcagccttgaacagatcctccacttcatgcgcataggcatcaaaagccaaccatcccttgttatcggagtgtacaatccgggactcatgaatcccagaagcttcaagccagtgacgaacagattccacagaatcctttgaaggagcaaacaaaccatgaacttcctccgcagtccaatactgtccatatttgggggagctggggtcagaactatacaaatattagtgattaggatgtacaccatgaggacaagacacataaaacaacttacacagccatgagatactcatcacccttctccaaattattctgggtaagaccaatgcgcacaggcagcacagaatcacgcttaatgcgctcgcccttcacccaatccaaatgctcgcttcgcttctcatgcaagacatgcttcaccggtgctgggacggctccagaaagagccgcgatcgccagagcgacacaaacttggcgtacgagcatcttgaggaacaatggagctgtggtgatactcggctatctgggatggggagtttccccctgatatatagtacacacgggacagctaatcgcaatgttgtgattgcaaccctaatttccggactgcgatggcgaaaaaagcactaattaagattggcagatctgattggatatatcctctagtagctgcatgaagtttgagacaaaatccggaattcaaccggcactagagatcaatgcccctggcataacgacttcgatatctctgcgcgggatagcttaagagcgcaggtggtaatttatagctcttattctgccaatttctgatattattacttggtatttcttggtagtttcttggtgattccttagttattgcttggtcattgcttggtgtttttgtcttatctcaagaggggtgctaggctagttcgatgagaacggacgctacagcggagttccgacggagaaatccatcgatgtagcaacgattcatttggggctgaacctggcgagaagtcagagatccaatgggagaatatgtaaagtcgttcagaatttaggattcttcgtgaaaaagaaaacaacctcgattccgggcgtcaaaccatgcgacacgggccggggtcttagagtcgaaggaacttctcaggagttattgtaactgactactatgtgccatctgtattcaaaatatgtgtataaatttatctaaatcaaaaggaaaaacctgacatcatcatcatatcgaatatcaatcacagtggagaccacaagacggcgtctttttttttacgaggagaaaaaggaaaggggaatagagggggaaagacactagaaaaatctagtggtggaagagacggatgccctgctcgacgaaggtgatgcccagcttctcggcagtctcgaagacaggggtgtcgttctggctaccagtgggggcggcgatgtacttgacccctgagcgggcggcacggaagacattgtcgatgaaggggaactagtgatgacaattagcatttacgaaagagtgtgggcggacaaggggattacgtacgaaggcatcggacgagacagcgacctcgctgagcttctggagccaagcctcacgctcctcctgggtgaagggagcggggacttcctcgaagacacgctcgtactcggcggtctcggcctcggtgcggggggtctggcccgagcagagcaggtcaatggcgttggacttgtcagcacgcttggtgccctgcttccacttgataccgatgacgcgctcgtggaagcgcatccaccagttgtcggccttgtcgccggccagacgggtgcagtggatacggctctgctggccagcgcccaggccgatgatctggccgttcagggcgtagcagacggagttggactgggtgtacttgagggcaatggtggcgacggtcaagtcacggagagcagcctcggggagggaggtggtggtcttgggggtgatgatggtgttgaaggtcttgctgggggagatgacgacgtcgttgcgctgctgggtcaggtggacaccgtaaatagtgcgggtctcctcaggtgccggggtgtagtcctcgtccatctggaggacgaggtacttgccgcccttcttcttggagaggatggccagagcctcgggctggtagccgggagcgatgacaccgtcagacacctcacgcgagatgatcctggcggtagggacatcgacgatgtcactgagggcgagaaggtcaccgaagctggacatgcggtcggcaccacgggcacgagcgtaagcctgagccagaccggaggtctcgatatcctggatatcgtccaccatgtagaccttgcgctccttctcgttcaggggcacgccgatagcggcaccagcgggggaaacgtgcttgaagctggcagcggcggggaagccaagagcttgcttgagctccttaaccaaaggccaggcgttcagggcatcgagcaggttaacgtagccaggagctccattgaggaccttgaaaggtagctggccctgaaccatgtaggcagaggcgggcttctgatgggggttgataccgtagcgcagcgacagctgctgcgcaccgttgccagcatactccttgcggaaaaagcctgagatagcggtgtcataatcggcagtctgctcgaacgccttgagggcgtactgcttgcggctagcctcggtgatagcgccggcctcgagctccttgaggaaatcggagtagtcgagggggtctgacaggatggtcacacgcttgtggttcttggccgcagcgcggagcagagtcacaccaccaatatcaatttcctccacggcctcgtcgatggtgacgttgaccttggcgacggtctccttgaaggggtacaggttgcaaacgacgtagtcgaccttggagatcttctgctcggcgagatccttctcgtcggactcgatgtcacgggcgaggataccaccgtgcacagcggggtggagggtcttgacacggccgccgagcatctcgggggccttggtgatggcagagacatccctgggatcaatcgttagttcctgggctgggtattgatcctaacgcttcttcttatatttcgttgcgtcatcgatgacagaggcaactcactcgacagggaatccagcctcacggatcatcttagcggtaccgccagacgcgagaagacggacttcctgcttgaccagacccttggccaggtcaagcagaccagtcttgtcatagacggagatgatagctgttcaatcacaaaatcagaatattagaattgaccatgaactgcttggaataaataaatcatagtccggggaactatgaagccaagagtgacataccggtcttttgttgagacatgatggatcctacggtcgacactagatatgttagataaggaattcccaaatgcagcccgcaattgaagcaattgattgatatgaagactccaatgacatacctgaaaccaagcgaagagggtataacaaatgacgaacagaaagaaaagaagaaaatatgactcgcggggtcggaccgattgcggcggcggggcttgatagcaaaagttatattacgtgatcaaccacagcccactgtggcgcgacccaatcagagatcagtattatgtaggagaccttagcggcacacgtgacctgggaatacataagagatttctcagatgcgccatcttctccttctctttttcttcttcatgaacaacgcaaaactcacattctactcaaaaagcgttcctacgaagactcgtctgatgaagtacggaaatcgtatagagaatggagaccaagtgccaactggcgaaggtatcgatcttgggtgcagtgcctgcttgacctcggtcatgtagtagggattgcaatgattgattctacataccaatcggaaataataaatataattgatattctttttgaaaacctcgcttcttataatctttgtaggtttcatcagagttctttgatatacggagtaaagtagtcttctgcgtagcaaaaattcggcgtagccgagttctattacaattctttatcagagccatgaattatttcgaatgtacattaaacgttccctatccttcatgaggccgttcccagcaaagctcgagtcctcaatcatgaaccaggaaaactcgggcgtttttgagcctcacgacttcataacgtttttgacgcgagctccgatggcaagctgacggccaacatttccaaagcacacgcacgcgcagaaaatgacactggcaatccaagtgccgaccgcgaagctctcctgtgtgcaaccgaaatctggacccagcacatgctctagtcctgttccattcagaatgctggtgcggaatgggccggtcgacgcaggcacaagctctggcttaaggccaaggaccacccccatgccggccaagccaacggtggttgagaggacgaagccggtcgtggtgcggtcaatcaggtaccagagaacgggattcacgagcgcgagggttagcgatgcttgtgtggtagattcccaagggagtctccgctgtaaagaaaaaagagaagtcagccttgtcatatagcaatggagcaaaaaagaaagaatccacttaccatggcaaatgcaattccaacaaacgctccaacactgcgagcaacagcaacccaagccggggtgcgatccccactttcgtcctcatcggtactcgcaagctcggaatcagactcgacctcaccatccagccaaggaagcaggttaccgagaacaacaccagccaacccccaggagaccaagtattgcgacaagtcgtagtaatgaatattctccagcttgacaggcgtaatccaatggttatcatgaagataaacagtgatcacaccgtaagcaagaccaaagccaaagagcagcacgctgctcagtgcctgcggcaagatcacgccccggaacattccatggctcagacgagaccgagtcctccgcagcgacatctgccgcggttcaatggccgatttctctgcttcgcgctgcgactgctcgggcgggaactctgactccggactgttggcttccgtgccccaggggctagactcgtcgcggtccgccccgtcaaatgctgtcggggagtagatcccgtacagcgtcgaggaggtcaggttcatcactgatcctgtgcggctcacgctcgttgagttggacgcggcttctgcttgcgggttcaggtactctggctcgatcggtgttgggggaccggacgactccgtggaagcgggcgtcagatcgaatggtcgtctcgggcgcggacgcaggatgcgagggtgttcgttcatgatggctaaatgtatttgtgtgttgatttcaaagctccttaaattttccggggaccagatgatcgccggcgcgacaaaaaaaacttgtgttttatttgtcccacacgtttagatgatccaagctctgtaagtcgagctgtaatagatggcacaagatgatctgtgactgggaatgtgttaagcgaaatgtcaaagtatggggaaaggagaaaatcgaaaatggagactgggggagcttagcgggacatgacgcttaccggaaatataaacttcctcgaagcaacaagggtcagcttgctatttatctcagggttctgggatttccgaggttaaatgaggtcggttcaggttggggagaagaggaaaagtgtaagcgtaaaggatctcaacaaattatgtacccttaggaatccgcctcgtattgttggccgcaccgctctgtagcaattcgtatccactcggacaccggactcccgttactcgtatgatctgctgaaatttctctgggatttctatagaagtggacagatgtacggagcatgaaaaggggagaaagaggggaattatcacatgcaatgcacgtcggatgtcaaggtagtactcgccacttatgtcaagggcttgggtggaagtgacttgaaatacaaccattccggaagagaatggtacgcctagaacataggagaaagacaaaagaaagagtagatcgtgatacacaagatttcaaaaacaaaacgccaacccattagtcttccatcgcgtcgtctccataacctcccccgcgtgggctaggtagaccccgaggggctggggacgaggcttcatgtcgtccgtaaccattggcgccttcataggcggaggaattttcatcaccgtccacgtcatcttcgtcatcctgatcgtcagagaagtccccttcctcgtccgctcgtagaggggcacctccatcatcttcgtcgccagaaacttcgccaaggagttcgcggtcgagatcatccagttctccctccataaagtcatcgggtccgtgctcagggtcccaggttggggtacccatagccgatggccctgcgcccaaagcatcgggatggccgtgagtgcccttggcctgtaacgctgcgggtttcttgatagtgccggggttgttcgttacacccgtagacttgcgcttggaagcactagggcgaggacgcgggcgggatcggttgttggaacttcgcacatcagcttcgagagccgccttggcctggtatcgctcctcgcgctccatcttgcggtctttcttgggaccattggcttcggtgtaatcccagcgatcgagtcggcgggctgcttttcgcactacagagagaaagacgctcgcacattctccaaagtcatcttcttcttccgggttcgggaagaggccacccttgccccacgaggtttcttcgtcatctgtatcgtagccctcgggcagaccctgaagcaagcgaccgtagcgcgcgaaaggaatctcactctcccgtttagcacggagaacgcggtatgcatttgatttacgtttagccagcagatagtcaatcctctgccgacgattttgctcaacggctatctggtgctgtgtaagtggccgcatccgacgcatagtaggtgccgatgaaagcgaaggctcagtaataaagcggttaagaactggatggttggggcctggaggagcgggggaagcatcgggagtatgttccatcctcgttttcaagatgagtcgctgttggcccacggctcgattaagtgatgattcccgcttggcctgtttaggtcgcggacgggagtgaccgggggtcatatcatcgtcctcatcatctaagctgcgtttagcagaagggtgtagaggggtggacatagcagagccacgacctcccataccagagtagtctcctgcgaatgattcttcgtcaatgccgaattctgcggttagaaaaggttagcgttctgtagacatgtacaatatgatagctctccagaattcccaactcacctttcttgggtcgcttgggaatgcgcggtagtggttcctcttcttccaggatgcctgcgcaaaatgtcagtgtcccattttcaacagtcagacctaggcacacgtacgtttgcgctctaatcttttggactccccgtattcctgttcctcgggtgtatctaaattctcttcgctggcttgttcctctgtcaagatatcaaaggcaggtactttcaaaggaaggccctctgcaccctcgccttccacacctggaccaaacggattgttcaaggcagcctcgcgactgaaatcgctctcgagataccaccacatcagccagaggaacgccctagcgcgactttggctgctaagtgtagacctcatgactaggtcgaagaagtctcgcggaggaaagaagtgtgtttctgacactttgggggcatactgcgccagaacaaaaatcaagttcacggggttggtccgaggtatattctgccgcttaatcttttcgagggtattcggctggtccacatcctctgaagcgcccttcagaatagacttcagacgaggagcatcctgcagctgcttgtaggcgttggaatcctgatgcgcttgtagtgaggggatcgagtggtaggttcggagttgagcacgcatttcggggaagactagaaatcgcgacgatagtgattagcacagaggtcaagtatattatggcatagctgcaagcgtacagttcagggtagtgttcatgcgaccgaaattgaccagcagacaaaccatagccatattgatagccgccggtttgtcgttctgcagtttatccttcagaatcttgctggtcttgctgctccgagccatcgcattgatgtaaacatccgcgaagtccattcccttctgtccgtcgggataccgcgtaaaaacaggcgttttgtcctcaaagaccagcttcaggaattggtactggatatctttgcgccatagaggtatgccgtcgtctttcttcaggtgtcgaatcttattgccagagtagacagagccaattgtgccattcgcttgccgccttgtaccgaccgttgcgctcgcggtcatgccgtgagactggtcatccgcagcctcggacatcgcgaaggactcgtccatcatactgttttcgaagtcggtcatcttgggtttattggaaccgctagcaggtccgcgatcaggattctaggagaatcgcaagttgtaatgtgaagtgccccctaggaggcggccgatgaaagaggcagaagtagtgtaagaggaacgaaacgaaaaaggaaaggataaaagtgaaaaggagtgccaagtaaaaccgggaaaagggaaaatgaagttcaaaagccggaaaaagaggaagaaagcagagccgagtggcccatgaaggtatagctggtgtgatatctacccgtatcagacctcgcgcgtttaatatggcgcttaatgccacgcatttggatttccaatcgacggaggaagcagcgcaatagcaactaccatttatgatgtgtgttatttacatgcatattagtcctacggaaatcccactttacaacctagagaagaattggaaacacttttcgaaattgcattggataagagaactttccttctcatggccatctcagggccgttggttcgcttgttcactcctaattcgaacccgagaattcataagtatgcccattcttccagtggcgacagcgccctatcccccgaggtccgagaaaaatgatcaaaatagacaaggaaatgaagcaagatgctctcattcggagataatcagcctccacggacccgaaagcagaggacatgcagttgcaggtcaagccaacgccatacagaatgcaaagaataccttttttggcttcgaaacacaccagccgcgccagggggtgtaacggcgagataaccagtatccgaaaaaaagcgcggagaaagaaagcgcacgtttttgttttcgaaaaaaaaaaactcgactgcagaacgcacgagggcagcaacagaaacaaatgtccgccatgagataccgacgctgtaaaaagtctatgctgcatatgatgaatgcagccataacaacaccgaagatgaatgcgaagagaaaaagaaaacttttcgagatgatgaaaagtcatcaatctccgctcggcgcacgcgcgtcactcgaacgtatccccagtggggatgctcgaacataaggggtatctgacgagagcggacataggaaaaaaaagacaacgcattctatgatgttcatgcagtttcgatcacgggttgccccaagagagtagtggtgtctcccaggagcaaaaaaagaagatcggactgcgcgaatgcctcgtatccattacaaggcaatatttgaaaagccatgaatagaatcagcgaagagacatgagaggaacagcaaaggaaacgagattaaagcatacgcaaacgggaaaatatgaatctaaaacaagcataggaaagtcgtgcagtcatgacaaagcccgtccctgagagatagcacaggtagaagagaactcagggactcaatctgatcgtatccgtcaacgagagacaaaagaaaataaagcaagggagccaatcagacccgagggcatcgtcaaaagaccacgactgatttaccaccaggaagatgggccggaggagccggaggggttgccgtagctaccaccacctccaccgtagccagcaccaccaccgctgccgccgtaggcgggagcagcagcaccgccatagccgctaccgtaggagggggcagcaccaccagagccaccatagccaccgccaccgccgaagccaccacccatgccgccagggatacgacgcacatcacgagtagcagtagcaccacggccacggccaccaccaccacggccacgaccgctgaatccgctaccttcgcgggcaatgctctccaggaaagcgggaacctcctggtgggcctccttgagaagctcgagcaagtcacggacaacaccacggttgccacggttgaagaaagcagtggcgataccggtgttaccggcacgaccagtacgaccgatgcggtgaacgtagtcatcaatgtcagtggggagatcgtagttgatgacgtgggtgacgtttggaatatcgagaccacgagcagcaacggcagtagcaaccagaatagggcagcgaccgttacggaagagctccagagcacgctcacgctcgcgctgggtgcggtcaccgtgaatggcggtcgcagggaagcgctggttaatcaggaaatcagagagcgagtcggccatgcgcttggtttcaacgaagatgagggtcaaaccagtgctgccgtgagtgtgaagaatatcgagcaggacggagcgcttgtcagcatcctcgacatactcgaccttttgagtgatgttctccgaagtacttccgacacgaccaacggacaagaaaatgtagtccttgaggaaatcgcgagcaagcatttggatatcgcgggggaaggtggccgagaacatgagtgtctggcgatcgtcgacaccgggcatatcctcaccctcgacgatacggcgaatctggggctcgaaacccatgtccagcatgcgatcagcctcgtcaagaacgagatacttgatgttagccagggagatacgtccacgctcaatcaaatcaaccagacgaccgggggtagcaacgagaagatcgcaaccacgctcgatctgacgaagctgagagccgatgtctgcaccaccgtacacgacgcaggggcgaacccatgagcggtaggcgaacttgcgggcctcctcgaagatctgagagaccagctcacgagtgggagcaaggatgagggaggtggggtaagccttacgctggcggccgtagctgaattgaccaccaccgccaccctgggtaggggcagcagaaggaccgttctggaaagcttgagagaggatagggaaaaggaatccaccagtctttccggaaccagtctgggcacaagccataagatcacgtccgttcatgacgatggggaccgagtacttctgaacgggagtaggaatgacatagctggcaagcttgatgttggcaatcaggtggtcgtccaggggagggttagtgaactgggtaacaggctctgggacatcgtttccggaggcctcaacggggatatcatcgtagttggagaaattgattccagtctgctgcttagtggggtcgtttggcactccgaacagctcgcgctccaggcgagcattggcaggaccgggaacgtgcttgccgtcgcgccactggccatcgcctgagccaccacgggattgctgagaaccaccaccaccgctgtagccgccgctgctgccaccaccgctagcaccaccataagaggatcctgggtttccgtaagcattgggattgaagggccggagttttccatcgggagtccagctggtcataccgttcgcggggccacgagggctgaagttgggagcgctagcattagcccagttggcaccggcgtcactataaaatacaaaaatcagttgccgattcatgatagtcagtcattttggtactgtaccgaggaccaccgaagccaggtccagaaggagcagcctcagcattagcactgggggcgggagcgggaccagaaccgggaccacgctggcgaaggtgaggaggaatgtaggcagcacggccaacaggggcgttaccctggggggcgtgctgagattcgttgagggaaaggtttcccatttgcaaaccgtcggccatttttgcggttgaaagtgtctattggaaagcaagagttagaagatgtccgatgtcgacggtgaacgatgttgcgtacaggtttttgcttcaccggaaaatattggtcgtagataaagcgcaagtgatctggaaaagatacttgcaaagaaaaacaaatccacgtaaagtgtacctttagagagagagtgtgtgaaaagatcaaatcgcttttctgttttaactcgataagaaaaaaaaaaaagatcgagtggcaacaagaaagctcaggaaaaccacagagaatatggaaaatgcaaatctccggaatctaagaactctagagagaagagaaagagagagagagagagtagtgagaaaagggatgatggaggggggttgaatcaagagagaaagagaacggatgaagtctgtgggaaggaggcaacaaaagttggagacttggggcgtgtgtggctgttggaggtacctgaatggaacctatctgtctgctatatttacctgcttactagaagtaccggttaggtacctaccgccactgaagaaatttctactcgccagttgctgcacgtaggcggtctggacacccttgcctgactaagataggaggcgaaccttacgatctgagtggatgattttcccgcagtcccccaaagtatatcaccacctacatacgtgaggtcacatccatgggtgatctatgatgagggtcatcgggcattaaaatccaggggtttagggggacagaaggtccaaaaataatgtctcattgatctaatatcatttcttaggcatcatactgtttctctttctcttgctcttgctgctggcctcgccgacgggcaatccagatacccacagcggctaccagaacgaagaaaatcacgaccagctgcagtaagtaagatggcgtggcctcgggagcatcgggagcattttcggtgacacttggctcttggtcgagttcttaaagttctccaacatcatcagccacttccaactagcagcagaaagtagacagtcacctgtctagagctcatcgcggctacctttttcctcggtctcgggctcaagctcgagctcgccgctcttcacaatcttgaccgctagcttgggcctgtcgccggatcccttgggaacgttttggatcttgtcgacaacctcatagccctcaaggacctcgccgaagacgacatggcggccatcgagccaactgcgttgtttccgttagttattgccccaaaggaatcactgcaagggatacgaacgaggtgatagcggtggtgatgaagaattgagagccgttagtgtccttgccggcgttggccatgcctaagaatggtcagatgtctgtaagattgaatcaaatgagtggaaatgcctactcagctggcccttcttggtgtgacgcagcttgaagttctcatccttgaacttgttgccgtagatcgactttccgccggtgcctgtacacacttagaataatgcaatcaacttgctcggaggctcacaaaccatcgcccttggtgaagtcaccaccctggatcatgaagtctttgataacacggtggaaggtagagtcctggtagccaaagcccttctcgccagtagccaaagcgctagacatgggttagcatatgcaggataaacgttgcagacattgacatagcaatgcaccataccggaagttctcagcggtctatacaaataataatgtcagcaataattatcaattagttactgagagtatagttctacagacctcagggacggtcttgccgtacaagcccatcacaatgcgaccgaggggttcgtctccatgctgaatgtcaaagtagacctgtcaccaacaatcagtaccgcttgcatatagaccgagtcggaatatcaatgtcaatcaccttgctggtaatcttagggccgcgaggctccttggcctcttgggcttgaaccagggcaaagccaacggcgaagacaaagaacagggaaacgagaagattccggaaatacatgattgttaattgccactgctctggtaggatacagcgagacgggaagatagagtaattgggagcggaagaaggccagcttgcaatgcggagaatagacggggtagtgccatggaattcaggcaccaagttacggaaaaacgttgacggaggatttctcccggagttcaacgagagcaacaagtgacggctccatacgattgtcaggacatcaaccagccagcacagttcaagatggtatgttagccaccgtcaagatacaatagttcctccaaagaaacctgctaatagcctttaggtcttcatccttggtgtcaatttccccgagcggaatctgctcaaggcaagccaacccgcacgattgcgcccatagcctggatatcccaactaacatacattgagcgcaatagaaatccctcgagaccttcttcggaatcggcagcaacggctccggtcgcctcatgtcccgcttcaacatccatccgacctgccgcgtcggcgagctggccaacaagcaggtcctcgacctcacagccgtgctatccgaaatgaaaattgagaatgatctgcgcagagaagttctcaatgatatcaagcgcatgaaagagaccggaacttaccgcggccgacgtcatgcgctgggcttgcctgtgaggggacagcggacacgaactcaggtgggtttccccttcctcctcgtgctctattgatatctcatattgcacctgagagacctatgcgagcttatggttaactaaatcttaatagatcaaaactcctgtcaagttgaaccgcatggagcggagactataaacttgatagtgtcgtgttcgattgttacttttatgggatcgtctcactgtttttcgtgagaggcatggatttggcgttgtattgatttctggcactcgacctttgccagtttatatgtgaacggaacccctctgtggatgtattataggctaggcataaacctggggtgaatggaagcttcaaaacagaactatatatatgtacggtaaagtcgtagtgaatatcaggctgtagtctgacatatatccaattccgagctaaagatgtacgcaaagatgggaaagtaaggagaaaaaaaacatgtaagtctaaacttttgccctcaaccaagtgttaaaacgccaggcccatatgtgcactcatgccttcgaaggcagtacgccttcgccgcggttgatttggatccgcttatcctctcccgcgctgacaatgcccaccgtcttgtcccagcacacgctgaacaccttgacaccttcaccgccaacccgcttgctatcggacttaccttcctcctcgaggctcttgcgagtaattgagtaaacgctctcaccaacaacaccttccttgtcggtcttggtagaccggatatcccaaattctgcacgtgccgtcgtggctaccgctaatgagtccatatgtgctgtgagggtcacgggccaagctgacaacagcgttggtgtgacctcggagggtcatggcagccacagtagtagcagaggcacgtgggtcaatcagagtgatatggcgggcggcagtaccggcagccaagaggctgagttcggggaggtgctcgagcgagaggagcgagtgtgatgtggtgcgagtgtcaaccagagaaccagtgaccaaatcccatgtccgcagggagtgatcccatgaggccgagtaaccaacggtagcatctcttccatcgaaaatagcagcagaaacaggtgccgtgtgggctgacagaagagtcagaggaccacgctgcggtgtgctaacggaggtgttcagcttgcggcgctttgtgttccgagcattgctagaaggaagcaagttctcaggtgctgccggggcatcagtcttcttagttgaccagaatccaacggtgctatctgcggaaccagtcaatagacggttggacttggcatgaactgctagtgactcgattccagccttgtgaccatacagctccagctgaggagaaatttttccagtgaaaccaccttcaccctcagtatacttccacaatcggaccgtgcgatcaagacctgcggatgcgatctggtttggagaaacgaacttggcggttctgatagaggcggtgtggccaccatcggcggcggcaggagaggtcgcgatagtctcagacgacatattccagatgcgaagcagaccatcatagcttcctgatagaattctttcttggcccttgataaaagtcgcacctgaggcccaggatgcagcatgtgaggtcgtggaaaggacgtctgtcgcgctaacccagtcatcatgctggaacgaggcgatatgcaggggcgggatcagagctcgaacatattcaatctcgagggtcgtctcagctgagataccgttgtcgaccaaatattcatcgatcgaggtccgcaaaaaagttccattgatcaaaaactcaaatggaatgggcttttcgcttgagagaaggttgttcacaagtgtcgatagcgcatatcgtcgaagccctttttaaaggaagagtcagtatttgatactactatttatgatttctgatcggcaatgggtctcacctgtaggaacaagaattggaccggtgctttcaggcagagcaatatcctcctgctggctaatgagctgcacacggacttgtctctgtgctgactctgcagcagcagaagtgactagatcttcgctcattgtgaaatcgttcaaattgctgccggtgttgcacttttttggtggctgtcgcattttcggcgggtgaggaaaaaatacggcgacccgtgcggcacacttgcgcagagcgcggagatggccccactcggtctacacagcttattgtaatacactgcagttttaacatatatctggtgaatgaagtgatatttctattacgtggatggggcttatcctctaggcgctcttcgaatctctgcaatagcacgtcgccggtgatcagactctgcgaacaaggcctcgatcaggtcaatcacttcgtcagcagagaactctaagcccaactctccttcgagccaaaggaatttgatatcggcgagggagctctctagaatattgatcatatattggaaacgcagccagcttgaaacgtagatggcagtgacgggtattgcctcggcatcaccatctgtctcacgcatgaacaggtcctccaattttgagagttggttacagaaggagaccagttgccgtgactgatcctccgagatatcacccaaatcttcgatatcgatgactaccttgttgatcacagtagataagagcgatccaactgattggagcagcgcggaatgagacagtatgggttgccattccttgtaaacgtcgcgaattcggtcgacggttgcgctaacagaattctcacagtctgcctggaatggctgctcggagcattgtccaaatccctgggctccgtcaagcagatctgtgacgatagtgcgttgcgtctgcatctctttgctatacgcaagtttgccgaatttctccaaagcttcaacgtcgggctggagtttggagagtgcatgttcttcgactagtttccggatctcatcggcaaggtacagactatcattataaaggtacatctgccctgaagtgagtttcagcgagtagaatgtggatgatgtagctttgaacatagccaggatcaaggttggcaatgcaagaagaccagcaccagaagaagcgacgcgggaattggcgtagctgggctctagttagtttgcaaaggaaacaagttggaagacggcatgacttacgcaggctgcgaaatatccttcgaatcggtgatttgctgctgaacgaccttaagaacagactctgggacatcggtgattgtgaagacttccttcagggtaacttcctttggtgatacaaattgagttgtattcttcgtgtcggttgcgtttgtcgatgatgttttctggggctccgaaggcttattatcaactttatggtcatcttcatcctcatccccccagccccaggcatcatcgtcatcatcttccgcagaagcagctgcttctggtttggcatcgggagtctcctcgacgtcctcgtcatctagaccccacgcactaacatcttcctcttcttcatcaggctttgctgtttctgctttcttgggctcatcttctttatcgtcatcccagtgggcgtcccagtcctcattgccggcattctccaataaagcaccttcagcttgtgaaacctttcctctttcaattcgttcgacctgtttcgttgttccctgactggcggcaaggactttgcggacgctatcgagcgagtcgactctacgccgagtcaaccacaggcgtggagcttggttgacccacgagacgagttcttcttggccagtccaaccccacgactctatctgctgggtgaactgtgaaacatgactcaggatattctcaaactcggcgaggccacctagatcggtgggaatagcaggggacagccactcgcagattgcctttgaggaaataatcgcaatgaatgattcggagaaagtcgcggacaccgatgatggtagattttgtcgcaagtagcccaaaacgctggaaaggcgatccaaggtctccagtgcggtcgcctttgaggcctcaggctcaatgcgaatgctagtctccgtcaccaccacaccatggctagttccattagggtgaggtagcaagatcggatttacgatcgccgaaaagaggtccctttgcagtttctcgatggaggatgtgagtatatctagtcgggccagcgacgtaatagtgctctcaatagaaccggcatctgcatctccgctagagacatggaattcgccttgttgtcggtcaactttcaattgatcagcccagcgcgaaagaagggcctcaacaatctccgatcgtaacagtgacacctcatcggagagtatacccatcacatttgtattcgtaaagaaggcatcctttccaacagctgcgtcggtagactccaattgttcaatggcggtggtgatctggccacttctgagagcagctcgccctgtttccagctgctggcacaagcggtgcacctcctctagggtatccgctacggcctgattgaaggcaatctccgtctcaaccaaggtgactttcgctctcgcatcttcaaccttcgcctgcaggggttcggtatgctcatgctgcgcgattatttctcgcgcagttaatcttgagcgttctatgtcggcgtgaagttgtttcgcttggataatccagtcgtcggcatcgaaggtgttctcgcgactcaaggagctaatctcattctaatcaaagcagcgctggtcagtaatgaatgcccgacgtgcgtagatagccattgggggcttcgtacctctacctgctcacgtgccttcgatataagctcgagctccctggcgagagcagctgccgggaagttaccagcaactacactctcctcgggataggtcccttcggtgacaaagcccagcaccgcctggcacaactcctcggtatttcctgccatgataccaacttttccaaaaccaaggacagattgtcagggaacacgagcttcggagcttcggagacagatgtgcatgtaaagaggagttgagctgtcaacaacccgtgacttcgaatttgggcgtcaccgccccccacgtggtgtatacgctgtatgctttcgctctagatcgctaaattcgctagaattttaattaaaaatatatctcgtttgtatttgaatggtcgcaaagaatccaaaatctattagccctctctctttgttatataaattctttcagttgcccgctttgtaaggaaaaccggagactgagctctctcccaaacttggaaaactccgggaccaacacaacttttgaagacatctcagattcaccgtgtctcggatactccccctgagtcgaagtacttgttttctgtaagtcaatgtgaattgcgttctcagatcttattgcctacggaggggcatcaagtgtatcaaccttctatccccaatttctgcttgtcaccccgcctatgtcattgtccttgacaatatgttgcacctttcaagatatgatttagaaaggacctcgccaattgctgcttttgttcccattctattcaaacgcgactcggggtggatattcttctctcatccgagttgtggtggtcatacttgttctcggacaattccttaccgcacgtgcttatgtgctcacgactgtatcaaatgtttaataaagtgacacgaattgctaactaatcaacaagactgtcaaccctacggcgaaatatcttcactgggtctgtcccattgatcaatatgtcgccctcggtgcagaacagtcacttcaaactgctccagcagttcaagcctgattactcggcgagcgagttcactcagtatgaatcacagcgtaccggcatgagagtggtcgttatcgaccagccgggtcccaaagtgaacggttactttgtgctcgctaccgaaatccacgatgattcgggtgctcctcatactctggagcacttgtgcttcatgggttcccgcaattaccgctacaagggcttcctggacaagctggctacccgcgtgtactccagcactaatgcctggacggcaaccgatcacactgcctacactctggataccgcaggctgggaaggctttgctcgtatcctgccagtgtacctggagcatgtcattgctcctaccctgactgacgaaggctgctacactgaagttcaccacatcgatggctctggaaatgatgccggtgtcgtgtattccgagatgcagggtgtacagaacaatgcggctgagctgatcgatcttgcagcccggcgattgacctacccgcctggtgtgggcttccgctatgagacaggaggtatgatggaacagcttcgtgtcttgcctgcggaacggattcgcgagttccaccgtgagatgtatcagcccaagaacctgtgcctgatcctcactggagaagtcgaccagagcaacatgctggagatcttggataagttcgaagacactatcttggatgtcattcctagcccagaggcaccattcaaaagaccctgggtggattccaaacaggctccctacttggagaagtccgctatccagaaagttgaattcccagaggaggatgaatcatttggtgaaatcgaaattcgattcatgggaccggactgcactgatactatcttatgtaagatacaaaaccccaagattcgatatcaaatacttacagtatcatagccggcgctcttaatgtgtcacttttgtacctagccggttcatctgcagctctgctagagaacatccttgttgagaaagaacagctcgccagtgccgtctactattcaactgaggaccaccctagcatggaggttcgtttcacgttgaccagcgtggaaacagagaagttggagagcgtcgagaagagattctttgagatcctccaagatgcgatgaccaaggaattagatctgaagtacttgaaagagtgtatcgcccgacagcgccgaacctggaagttctcgactgagtcttctgcctcttcattcgcagagtacgttatctctgatttcctgtacggaaagcgcgatggctcaaccttgatggatgtcgcaactctgaaggaatatgatgtccttgaaacctggtccgaggaccagtggcgcgctttcatcaagaaatggatctcagatgctccccatgtcactatcttgggtatcccgtcccagaagatgtccgccacgcttaaaaaagacgaggaggaccgggccgctgcgcaaaaggagcgtctcggcgagaagggcctgaaggagcttgccgataaactcgataaagccaaggcagagaacgacaaggagattccgcaggagttgctggaaaagttcgccatccccggaactgagtcaatccacttcatggagaccagtacggctcgttcgggtgctgccctgaaatctggacggcccgacaacaagatacagccatttgttgatgccgacaagtctgaccagtcacttttcatccacttcgagcacatccctagtagctttgtccagctttcagttctcatctcagctgattctgtgcccgttcagttgcgtccattgctgtccatctataccgaggcgttcttcaacattccggtggagcgtgatggcaagatcattgactttgagcaagtcgtagtagaattagagagagacaccgtcggatactcgatgacgactgctcgcggtcttgggaactcggagatgctccgtatctccttccaggtcgagctggagaagtatgcgaatgccgtcgcctggctgcaggagctgtgctggaagtccgtcttcgatgtggagagactccgggctatcaactctcgtctcttggccgatgtgccagactccaagcgcagtggtgactccatgcttgctgctgtaaatgtgatggttcactacgcagaggagtcgatcacccgggctcgttctactttggtgaaggctcgctaccttaagcgcgtcaagcgtctgctctttgagaagccggaggaagtcgtcagccgcatggaggagatccggaaatcgctcttccaacccgacaacgtgcgcatcattgtcattgctgacctcgagaaactccagaacccggtctcgacctggaagcccttcgccgatgccctgggcaccagcgctgagttgcggcctatcactgaccggcgatcccagctgagcgatgccggcaagaacattggcggcaagtcttacattgtccccatgccgactattgactcgtccttcgcctacgccaccgcccgtggtctgacctcgtacgattcccccgacctgcccgcactattagtcgcgatttcgtacatgaacgctgtcgagggtccgctctgggttgcagttcgtggcactggtctggcgtacggcactaatttcagttacaacatcgacaccggctttgtcaacttcgatgtgtaccggtccccgannnnnnnnnnnnnnnnnnnnnnnnnnnnnnnnnnnnnnnnnnnnnnnnnnnnnnnnnnnnnnnnnnnnnnnnnnnnnnnnnnnnnnnnnnnnnnnnnnnnnnnnnnnnnnnnnnnnnnnnnnnnnnnnnnnnnnnnnnnnnnnnnnncttcgttgtgtcccggcccccgaacgcccacaaggcgttcgagtctagcaagaagattgttgatgactatctatccggtgctacgactttcgatcctttgatgctggagggtgctattagcagcatcgtggtcaactatgccaacgagcagatgaccgccgccaatgctgcccagggcagtttcatccgccaggtcgtgcgcaacttgcccagcgactataaggagaagatgctcaagaatgtgcgcgctatcaccatcgaccagatcaagggtgctctacgtgagatcatcttgccattgtttgatccgaagactgcaaacttggttgtcacctgcgcgactgtgttggaagaggtgagttgttcccggtctttacgatgtacgtatggattactaactttgattgcgaacagaccatcaatcagggcttcgaaagttccggctttactcccacagttcaggctcttaaggagtttgaggacgactatggtctgaaggttggtgacgaggaggaagatgaggatgatgacgaggatgaggactccgaaagcggatccgaggatagcgacgacgaaagcgaagacgagtgatatgttttatgaacgatatctacataggtagcgaggtagatcacataaagggaattgtggtgtcaaaagactctacatcacctcgacagtgatgaatctactctcttactcactgaaaacaggctgagactcagtaaacaccgagatctcaacttaaacaaacaaagctgaaataatcgcactatatgaaatgtagtcacacacttcctcagaagaggtaaatatggtacacgccaggcaagacccgccagcaaccgtcttgcctgaacccgaatccaatcttgaagactgcaatagttccaagaatagataaatcggtgaactgacctcttactttactcccatcgccgtgagaaggtacggatttcagtcaacccagcccaccccggcctctatgcccgtcatcgtccacagccccgaacgatttagaggtcagacccgaaacgaataaaactaccaactcaactccttccggcccttaagagtcctccgaataagagtcttacgtccattcctgtccttcttgcgcgccaggtatccatggcggcgcttttggacccgtcgcgacgggctgaacgtcacacggcgcacacctagggaggcacttgcggagaaagagcggcgctgcgagggtgtcttctgggagaggagtgatgacaggggtgagaaagcagttgcggttgcggttgtggttggcgaggagaggcggccgccgattgttcgcgagggttggaagcgggttggcgtggagaggagggaggagaaggagcgggatgagagcattgtggagggtgtgcttaattgttgcgggatttgggcgaatctgttgtcgggggagtagaggtattagctgtctggttggtttcgtggtggaaaggttgttggctgctgtacctagtcatcggggtccgcatggccgatgtggtggcctggaaggctgagggcacggccctggtgcggaggcagaacattttcaggtccctggctttgtttggagggcgattttgaggtggggtgggaacttcctgaagttggagatcgagtgaggcctgtggacaagacgcggcgtcggaagacagaaaattaagcgcggagccgcttacacggacccgcctagatatgcatggctacaatgatgtacggttgtacttaggttatacaaaggatagaattgggtaggtttagagtgtaatatctacaaccctataactataactacgcttgtttagctgtgaacaaatataacagtatacttgcagccgttaagaagacctacccgatcgggactagcgtcaccgaacttttttgatctcgagattcgaaatgctggacatcgctcgtgcaactctccgtcctactcgcaaatcacactgaactcaaggagaactctactctcagctctgtcactcccattaccgggttaaaccactctataaccaccgccaccaccactctttaacctcaaaaaacccatcaaacctacgaagaataaccaattccaccaaaatggcaacccaaggtcctcaggccctgcctccagtcacagtgcgaaacacacatgtcatcagccagtccgcagcgcatgaattcctagccgcctatctggaccgcgctgcgacagacccatcgttgcaacccaacgccagcatcagcgagcatggtcctgtctcacggacaaccaccgcagcgccgaacttgatcctgcacaacttgaagcgcgttcaaatgggcctagctggcgagttccttggtcgtgatctgactgtcgcgaagcagaaccccggggaggactatttggatgttgctgcgggtattccgcagaccaacggccatgatctgccggacgaaagcaatgatcttgtcatgaatgatgctgagtttggcatggaagctgaggctttcgcggatcaggaggccgggattgataaggaggaacgcaagcggaagaagaaggagagacggttggcggagaagaagggtaaggccaaggcgaaggctgaggaatccgattgagtgtggtgtgggtatatatatctgcttgtgggcgttgctgcattgggtcggagtcttttttcttttattcgttctattgctctattactctgggctggttgggttttggacgtacaaaagcactgctcgcatttcatgtctggaacaaaaagtgtcatttaagagtttagacggattgctacaatccaatcaatacataatagaacatttccaagcctcgcttttacttctcgagagttgagttccaccatgtcgacacaaaaaagtcgtgtccatgtcatataaaaatcgccagtataacacgcaccacgtttacagctcgcgatctgcggccttgacaggcttttcactgtcctcctccttgttgctagtgaccttgccacccttccagccaagcgcagcgagacgctcggtgaggatggggtgggagtagtggtagctagcataaatcggatcggcatccatagtgctcaagttctggatctggagcttcagtagcgaggaagcgagcttgtcagagtaaccgaggttctgggcgaatttatctgtggaacattgttagtaaaaccgagtgtaaaaccgagtgtaaatgtgatggatcgaatggaacataccggcctcaaattcgaattttcggctgagaatgttcatgagaagcttcacgacagcatccataggagccagggcgtcggagaagagcaggaaaccaatcatgataggctgttcgttgatgaatccgaaggactggtacaacgacttgttgttgacaaagacggagaagagagcgaaaatgtagaacatgtgggcctggattacatagttagtgataattcgccaaaagagcaactgaacaaattcgtacctgggcaatgccgaagagcttggtggtgtggctgaggctccagtggccaagctcatggccaagcacagcaacaacctcctccggctcggtcttctcaatcaaagtatcgtagatgacaatgtgcttcttccatggcagaccatagaagtaggcattgctgtgggcactgcgcttgctgccgtcaatgacatggagctcggagagagggaagttgagtctcttagccaagttctcgacaccggtcttgagttcgcctggctgaagaggcgagagcttgttgaacagaggcagaatcgcaatggggtagatagtaatggcgaagatctggaggaagacaccgaagagccagaggtagtagtagaaggaggtgtcaaacttctgaacaatcttaagaacggcagtgataataggagttcccagaacaattccgagcatctgccccttgagcatatccgtaatccagagcttgaccgtctgcttgttgaaaccgaacttctcctcaagcacaaacgtgttgtagtacgagatgggcagcgagaggatagtgcttataatgttgaaaccgaagaagaataccaatgtctgacaaatttcgccttggaaccgaccggggagataccgagccagcaccagaccgctgaggccccagatcttggggagaacatcgccgtagatgaaagcaaggttttggacttgaccgtaaagaccagagatgaagccgaacttggcctttgcgcgaccgtatgcctgtagtgatgtttcagtaagcctctgtatatgatataattccccgtcatcgggttcatacctgactctggtcaaagaccttctgggtaacctccccttcgaggacctggggaggctttgtccgttgcaaaaacttgtactgccgaagtgacaggaaaccctcaaggacgaactggcccactgaaaatcccacaagcacgttcttccatgggaagagcgggcgatcgagcaaacgcgccaattgctggaggacagttattagcgacgtgtccacggtggaaagcatatttaccgtataaacatgatagtatcaatcaaatcaacttacctcgaggatatacatgatcgaaatcgcgcaactaggcgaagaaagaggacgttgttcaaggcagaagaagctagtttgttattatcggcagccttagtcagatctcatgcatgacccttccatggcccggggcctaacgcaacgtcgatctcaggaattgggcctattaattaagtaaagtcttgtttattttaggccaaatgtgtgagatgaggagttagtgggagttaattatatgctagtctgcctgcatttgaaaagtaaataactggcgctgatgcattgctgaaagtcttagtacaatactcgaagattgtagatgtcatctatactcaaaagggtagtatttctcgagtcgctctatatataaaagcagttggtggcttagcgcgtttgatcatccccgtgcgaggcaatacgagtggttatggtcgtgcaatatatacatccgacctgcagactatctagcatctaccacattgcaaatgtttatatcgattaaacatacagaagctctttgattatgccggccctaatttccctgcatttcagatcacagacctgtataggcctatctacataagatccgataatgcagacaaaaaatgagcaatgaacaggaaacctcttgggaacaactccctcgtacgatggaaataaaaagcacatatcttattcgccgactccacctgcatcccgttcgtcgtccgtccctcagatcaaacccgagcatccagtcgcggaccaaatcaagtggtcgctgacatgcatgaaggtaaaccgatcaaggtggcgacaatacatgcattgcgcatctcctccatcttctctattcagccgggggaatcagttaaatcacgtctttaattttccgactcgtcatgaccataaacttttttgcaatcatagatcgcaagactcgtgttcgagggttggtggggtgggatcgttatgcggagatatagcaagatttatgtgcaaatcaaattccccaacacaacagatctcattccccaaactccccattccgaactgggaaatcgttcaaaggactgctttactgctgcacaggctcaagggtgttaccactgcgaattgaaaaagtcagcatttgtcactagaaataaccccaaaccagtagacttacgcaacaatgttggcccatccgatcaaacgccagtgcttctcaattctgcgactgatggcgatcttctcgccaacttccgtgcaggcgggactggtcaagctgagcttagcggcatcagccttgacaccgaggaccttagcaccagtagcggtagaaccgatgttaaccatcaggacttcgttcttggcaagcttggcaaccttggcctgcttgccgtcggcggtcttgacacccagcaagcggcggagcaggaagtagttgacctcaatctcagtgtagatagcaggaaggcggccacggtgaccgagaacgaaaccgacaagacgatctgcacggcaaagcgtggggtcgacacgggtaccaacaccaatcaaaccaccaggaacggcaaacttgaggtcattgtgctcagcgaagagagacacaatgcgggagaaaatgggtcgacactggatcttgccctgctcatccttggtgacgagaccggggcggatctcaatctcatcgttcagctttacaacaccggtaaggatggaaccaccggcaacaccacccttgagctcatcaatctcggcaccgggcttgttgacatcgaaggaacgaatgatcatcatgtgaggcgtatcctggaagttgcggatggggataggaatcgtctggacaagtgcctcgttgacagcatcaatgttgtacttcagctgcgcggaaatggggataacgggcgagccatcagcaacggtaccacggatgaacttgagaatcgactggtagtgctcaagagcgttatcgcttcgcatgaggtcaactgtttattttcatacgtcagtgcttcgtttcatcgaccgtttacaacaaccaagattttacccttattttggagaatgatgatgtggttgagcttcataatctcaatggcagccaagtgctccgaggtctgcggttgcgggcaagtttcgtttccggcaatcaagaggagggcggcatcctaataaaatgatgttagcctatcaccgatcccttgaggtccgaattggtgcagtgagggatgaaacctaccatgaccgcggctcctgaaagcatagtgctcatctgtgcaaagctgattagcatcaacccttaagagaagctagattccctaaggtgcgcaagatgcgcaagggagtagatactaaccagaatatcgtgacctatgattgaagattagcggggttttaatttggacatagacatatttagcgaacataccagggcaatcaacgaaactattttttttggatcaaaggttagcgtataccagataaaaggagggaccttcgggttggaggtagactagggattcgcgatacctgacatgacgctatatcataaaattagatgagggccacttgaggaaaggctctgagtttagacttcagaggggaggcagaagtacataccagcaactgataacgacctgtacatccctcgcgctcacatggcgggtcgacttccttctcgctcttgaaactcttgtaacatgtagggcgagggcactcggggctgtcacacttgtagatcttcgcgttggcgtaaccaagcttaatggtaatattgcgctcaagctcgttcttgaagcggacggtttgaacctcagaaatagccttgacgacggtggatttgccgctgaaattatattagtatgtgtgtaggaagaaaaaggcgagagaaggtgtctaactgtgcgacatgtccgatcgtgcctggtaatcatgtcagtaaatttgttatctagtaaaataggtgcgtttctgaacgcgctttcaaagacgcattcacaaaccaacaatcacataccgatgttctgagtagcttgccgagcaatgatctcaggcgaaagaggtgtcaattttgacaagtcgagggtttccgggttaggctgctcgggcagttctgggcgcttcgggtggggagcagagtcagccttcttcatggcagacttgagaggcttctcctcctgctcgaggggctcctggtcctcaacctctccgcgagcgttgtgggcatcgagcaaaggtgagccgggctgggatccctcgtcagagaaatcgccgttggaagccatatttgcggaatgaaatagaaaatcaactcgcgatcagcagcaaagttgaatgaaaacgcaggtggtcggacgaagctggtggaacggtagaaggtggaaggtcggatgaaaattgcttcccgccgatatgataatggaagaatgtaggtgggggattgtgtgtagtggagagccgggcggtgtctagatggcaactctacattacctctacgttataacggttttagtaaatatgtatagagaatatagttcaattagacgtttgttcaagtcgtttaatatagtttaaagtgtcatggtttattgtgcgtgattcgttatcttctaagaaaaaatccctaactaatatacaactcacaccaggtacgccacatcggttttatagagcagtgagggatagttaacatactaaatcattcttattcgacttgaatttaaagaaagaactatttcaaaccataatcataattattttcttgggcaatagactcagcttcttttcatacatactcatgatacattggttgccactgaggatctatttgacggcacaaagggtataaaagtcggggagcaatgagaagttactcatcgtcactatcactcgatgactccacttcttcttcagagtcgtcttcggagtctatcagtgtagacggatcctccgcaggcaacatgacaaaggcagccaagcatgtgatgcggttaccagtctcattggtagtcaagagctttccaatctgagtcgtatccctctttccttgctttgctgcggaaacttctttcccagtaaccttccaaacacggacgactccgtcactgttgccggtaacgaccaagaagtcgttgcggaattcctttgcttgaccttcaagagtgaggatttcgaaatccttgatgcggccagggaacccagcttccttcccaccaacctgagcaacaggggtagcatgggaaattgagcattcggtatcatcctccgcttttttcagttctttggttgaatagaagatcactcggccatcctctgtagagacagccaagaaatcttccttttcaccacccttcaaaggcaaagaaacatacttcatctggtgaagtttgcttcgtgggctaggaagaagtctgcatctcggaatcgagtcctatgccaatagtcagaaatttgatcaacggtataccatccaaataacttacaattccgaacacgactgcaccccattcgaaagcaacggcaaactcctctccttcggagtcccatgcaatgcgccggccttctccagtgctccatctcgactccttgacaccctgtaggacttcccgggtaaagttcaacacaccagccttcctgccggtcaccagattccacaatctcatacatttctctcctcgcccaacacttagcattagcttcatactggggtgaaccgcaaagtggttcactccagatggagcagctccgggaggcgctgtgtcaccgcttggccgtccttgaatttttgggtttggtgctttgatagttgatacaacggtccagtcacgggtcttggagacggaaattgtgttatcctctccggctgcgagtaacttggttcgcgaagggaaattcaacgaggtaatactggcagtgtggtgcaacaatgatcctagctcacggttccggggattttcgaggatcttgtttccggcgaaggtcggcacggatggatagtcttcattcacggcaggtggtgcggcggagatcgaatacaagttgatgcgctcatctgtactaccactggccagcatcaccttttgggcatcgacagggtcggtgggcttaggtagtggcgacaatgctagacaacgaatggcagatccatgggcttcgaataagaaagtatccatgcattggatggctggagagtcagcctcagcctttgctttcaggctggaggctgggatcccgaccgtgaagccatggagcactcgctcataagagcccgtgacaacctggacagtgacagctgcatcgggagtctctgacggagtagggatggatttagtaaccttgggaggagtaccagccgtcttgtcgtccttggaggcgtcggttctcttgcgtttcaccatgattgctcaattaatgattgtggtttctgttatattgtagatgtgaaagcttggtctagagggcggacaactttttttcttttttctgccagatgtttatcggccgccttgataggaaatagattcatggcctgaatgcctcaccgccattaatatgaggtgtccaatatatatatgcctgaggcgtcacacacgcaagcggagtcagaacaatacggtgcgttaccagttgacgaagacagccttttttgaaacgcagaagtctctcacaaccatattctagtttaataagatagaaactattcttgcattctctaatagataataaacattattttttcattcatcatcaaagagaattcttttgaagtaccaggtacctggtcaagccgtgtattttttatagagggagtgagtaactggttgtacctaaaccaacatcttcccgttcttccacatttttcataccgccctgtaacctcattttcacccccttcgaaaagatcctgctctaggtgcttttcatcgcctcctaccctccacccatcagtttcatctttttcgagcgattttttccatctggatgacctcgctcgaccagttccccttgttcccgcgttaatcggatgctgcgttccgaagctagactccatgctccgtgacgagctcctacgatctaaaaacgatgagatcgcgtacgtattaatttttatcgcgacggaaattcgattgcgatgcctaaaaaacgatgaattcgtcgctaatttggtggttagaaactgtttgtcgcgcagaaagcgcaagctcagcgcattgtatctagccacggtcgggtttggcgcgaccgaggacgctcattaccaccagaaagaacaggccttccttgacgccaatgatctctccaagtaagtccagtcgctttgatactctactagtggggttcaatttgcatttatttattttggtttgtaatttctcaatgctgattccctatccagaggtcgttatttcgatgaagctactcttccaacgccagcccatgcgcgcgcgccctcaccaagtcgaaatgcgattcccccgacaacacctgccagcactagtgccgaacctgtcgccggggctactccacccttaacggtcgatggcgtagttccgaatgcgactgagcctcaacagcgcggaacgcccgttctagaccaacctcggaccgcgacacctaatctccctcctacccccgtggatacaaccggaacaaatcagctctcggtgccagcaatcagccctaagctgccaaaggacctcaacgtgccaccgatccatgtgcagtcactcgacgcatcgcgcctcgaccagaaatgtagtgtaccggtaacagaaacgccgcttagtgcctacgagcatgacgagaatcgagcaaagatatctccccgcgtgtcaaagctagctgctactggagttccatcactggagattccctccaaccctcttcgaaagaaaaacgaagcacgaccctctcttaccttgggaccatctcacgaccaaccaccatcacccgcctcctccactgacccctacaataataatacacctgttcccgttgccgtatcacccgacacaagccccgcagaagaagttactgaggataatgggacaattgatcgcccggaacacaagcatgaccgatttgctcatgctcgcccgagcttggttcctttgaccccagatgagcaattgcgcctcgaagaagctcagtcgaaatctgataagcccttgaatgatgtggtcgccgacataccttcatcgaaagaggtgattgtggagagcgtggacaccggtgccgatacagatcgcatggatatcgaccaggaacctgctcccgtctcgtctgaagcgaaaccatcacaagaacctgggacgactttgcaatactcgctgtcaccaaccgcacaggccgaggccactgcagattccgctgtcgagactcccgtggctaaaaagccttctatcccacctacgcaacctagctcagcgcaaccagagcgcatgacgactcgtgtatcatcgggagctatacgacacaagtctgtttcagagatcctcggagaaactcctaagagtacccctcatgatagaagccacgcagccaccccatctgatcaaggctcccctgattctgtcgcgagaatgcgcttcaaggaccggaaggagcgtgagaaggagagaagccgactatccactgttgtttttcccaagcagccaactcagcaggagaaagccgactctatggagctgacgcaccgagatatggatgcagttgccaagctgaatgaggagcaagactatcttttcacgttatttttgaacagagcatacgctcctccccgaggaacaaacctcaatactctgctggcgtctgcgcataagactttgagcactagcaatcatctgcttgaataccaagaacagatggattgccgtactctccggcgcatctatgctcttcagaatgccaatcgatggccattgcgacaattaaaacgctccgttgaacctcctcgccagggaacacattgggacgttgttttagatcatatgaagtggatgcgaaccgacttccgggaggagagaaagtggaagattgctgctgcaaagagttgtgccgattggtgcgcagaatatgtcaacagcgacgtggaacatcgcaccttacttcgtgttcaagcaaagattccagcgtcaactctggcggaaaaaaatccctctaaggctggtctcagcccatcttccgacgttggtgatgaaatgtttggtgtttctcaccccactccagatctcatcccatccgccgaagaggaatcagtcagtgatggattcaatgatgagcctcggcatgatattcacgacaccgtcgctcctgctgctattttctccttgggctcggatgagttcaacttctcaattgacatgacccccgccgctgaaaagctgttggaggaactgccaatatatggaccactccaaatcccccaaggcacgaacacaccggtattcaaagtctcccctgacgcagtttggaaaacggaactgctaccagtgtcgaaatttgcatcggcgaagattagcttccacgatgacgagcgtcctcgcaaacggagtcgatatgattactcccagtatggcaatgatgcggacaatcgcatcaccgaattggcacctgagcagacaaatgtcgcgctgttccgaccagagaacaagcccattcgtgatcggattcaccctggtcatcaattccggcctccgactgaacaccccatgccttctgttggtttctttgaatcacgttcgtcctcacaatggacttacggtgaggatgatgaactccgacgcttggtcaaggagtactcttacaactggtctctaatttccagctgtcttaccccatcgtcgctcttcacctctggcgccgagagacggactccttgggaatgtttcgaacgatgggtaggactggaaggtcttcctgcagatatgtccaaaactcaatacttccgagcatatcaccagaggcttgagactgcccagcgcactgttttggcccagcaacaggctgcgcagcaacagcagcaacaacaacagcagcagcaaggcgtcaacgctccacctcagccacctgtccgccggaggactactcagcctcttcgagttgaccggagacgatcttcgaagcatcttgctctgcttgatgccatgcgaaagctggccaagaagcgagaaactatgcttcagaaacagcagcatggtatgtttgaaatagacgcaggtcaccttgtgccaagaactccactgacatttcatctcttagcttcccatctcgcttcattgcgaaaagccaatgaggctaaccagcccaagcctccgatctcgtctccggctgagttcagccggttgaagtacgacagagagatgaagctgcaggaaaggcaggaacagtaccgccagcaaatgattgcgcagcaaagagtaagtggttgttaacgtccctacctgacagcactgtggcttaccccccatataggctactctcgccgcgcagcgttccggccaattacctaaccagcagcaaatgatgaatgtgccggggcgtaacaacaccatgcccccaacttccaaccctagcctacccagtgggactccgaatggaatgacaaatggcatgccctctagtgccggtgtcaatcaagcccgcccccttccaatgcagaacatgcccaatggcgcacagcccaatggccagatgcctaatggaatggccatgaagatgatgccgcaagctcaaatgcaacaaacaccaggggcacggccaggcctgccaatgcaagcctctcctgataacacgcgcgtgattcgagaagccaatcggttgcaggagcagcagcgtcttctccagtctcggcaacagcagcagcaccctcagcagggccagcaattccacaacccgcaatttgggtctcagggatcgccgaatatgagcatgccgaatgttaatggtcctcctaataaccctgctatgatggctgccctccagaaccaagggggaatgcagagtccgtcgttccatggtagtacaccacaaggcgtctccacgccatcacctcgtatgggtcagcccaatcctctttcgagcggtgttgttcctcaaatcagcactctccaaagccagattcaacgcacgaacccgaatatgccccccgagcaagtgaccaagctggccacggatcgactcaaccagtatcagcaacagcaacagcaacgcttgtcccaacaagcagcgatgaatgctgctgcaggtagcatcaacgcaaactccgttcaggccaactaccaagttccccacgaggctagtttccagactccgaacggtggttctgcaatgcaggtccctcaaaaccaagggttctctccaatgatgcgggttccccagcccgttcaacagaaccgcgtcggcccgactagctcacccgccatgaacggtagtgcgcccctgcccagccgtagcgccactcctcaaaaccagcgcagcggcagtgcccaagctggcgccgttcaaggttccaacaagagcccacacgctccggcagcccagaccgcgaccagctaggagcttacatgtcctccctgcaatacacttgcaaatcctttattcctccccacattaccttcatctgtacatacttacaccaacccttacgctgatttattttctacactttgtctttcaccgttgactcggattcttgcgctacaccaacacctaaacctcccccatttgttgacctctaccgcatgcgtgctctctatttttgcttggctttttgaaaaggatgttcatcatttatttgaacttcatatgcactggctctttttcaccaagtgctgctctgaattctgaattccgggctttggtttgtatcattgggaataggcgaaactggggcggacgaattactctaggaattgagatgaattgtatgattagttaggatttttttttcccaccatatttctatgtagtttaatttcaatttgtagctctgagagttataccactgatagcgccaaaccccgtccttccacctgtctcgccgactacttgcagtcctcatttatatgacttgcttttctaattacttggccagaccctcatgtgagctcccaattttatttgtgaagacatcaaggagcgagttgaaattagaacttatccagagagaactttgactaaactacatcccgtcaaagacgtattgatccaaaactagactatttcctattcaagtgaggatataacacacaaagtaaggaaagtataggtttattgtgcctgtatctcttggctactctcaatcttgatttgagacaaccctgcgaactagccctggggatttctgaatattgcaatatgaatactccgaacgaaagcgaaattcaaatagaaacaaccgactgacccaatgacttacttcatttgtcttgtctggccaacgaccaatccaataccctaggtggtttgggaactggtttctttttggcacgctttggcttcttcttttcatacatcaaccacccggacaccggctgaatcgaatcaagtccaggttgcctagtgggaatggccgcgttacagcgcttcatctgttagttatttcccacgaaatatagaagggttcgccggtaatcatggcctccagaaccatctagcatcgctccactcgaagtggcttgtatgccgatcaacccggccaacatcacagcgtcgaattcgtgtccaagattattaactagaaccagcacagagacatagcccagagggactttctctgtgtctacgcagcgtgacaaagcctcatcaagaccgaacttcgtgtctcgtatcttaaagtcttgcgaggatactggaaagattgactctgggtgaagcaactttccatcattactccagaaacaaaagaccgatatccagcctgtcagataggttggcctgctagccccgcctcttctgtccgcacatttgctccagaagctcagtacatccggtgcttcggggttgtcgaaggcagcaacgaagttgttaagaaccggtcgaagaagctgagcaaatcgagcaggctcatcccctaggtgagctagctgatcaagcttcgttgccataagtgcccagtcctcacgctggccgagtaaagtgacagacggaattccgcaccggatggtaaattggtatgagaaatacttctgtgtagagcctatcatcaatatagctgccaccacctcatcggatgcagtcgtggtactaaaggctggcataatccagttccgtagctccggattcacaatatgctcttccattagtttggtcatatccaacgccatttcaccaaagtccacagtgtccatggcatcatttgtgataatgtttaggtgtactgaatccttacgcgagacgaatagatgtcgcagttcctcggaatgtgctactatgaagaaactgagctgcgacagaatggtaaaccaaacatcttcgggccggagtataaggttgtggtgatgactatatgcgttgaacacggcccagacgaagccattttcggatgcggagatgtgggatgtgtccaagaagtctttggcaaatgagttcccgatcaactttttgccgtcgctatgctcttttggacaggatttttcgaagagctcttcgaccttggctatcctctggagtccccatgcacgcggtggatttttggttgttgtaaaagtaataggcaatttgtcgttgcggaggatgaagcttaaaggatcgaaaggaatcagagaaaataggtcgagtacttacttactaacctagagcataagaacgaataactacgtaaccttttaaaatctactccgtagattaatgcagtattctataaacaaccgagttattgcgtattctagcttctagtatctcccaaatggtaagaagttgacgaagtattctactctctttatttcctagaggcaagcagtgaaagatcactgaccgagagcagatcgctgatgttcgtactgccatctttcgctaataccgaacgttcgctctcttctagatgccgtagaagctttttgatgctttctgcccggccacttacatgcaggatgttgccaacggcagcatgcagctgtaggtactggacttcaggaagaggaaagcgaccgtcgtgactagtcaatgtgacaatcctgtcttcgtaatagtataccgaaatctatctcgccgaagacagtttcggctaagtcgctcttgttcagttcgaattcctggtgtgataagggagttgaggtcttcaaccgaatcgtcaaagctaatatggggggaggaagtgataacaggccgtcttcccactcgtagacagaagaggacccagcatcaatgctggcagctagttggccgagttcatcatcgttgtggcagccggaacatcctctgacaaattgacctgcccatccgaggggaggtatttgaagcaagtctcaaggaatttcttcgtatcggtgttgagcgcttggtagcttgcgagggtcgcctcccaaggctaattttgcctcggcataggtagagaagccgacggatgaaacagcagggctgagactactactatcatcttgcgacagcgacattgtgcgcgacaggtggcaagggaccttatatagtctgccacatggatagtggggtggtcgtggcgggtgaggattggggcgagccgcactcctagccaatgatcctcatcgctacctgagatctaccggttttgttggttttcagagccttctggcgagtacaccatattcagactgaaaagagagtaagaaagtgatgagggctgagtgacgtgagatggcttgaaagagtaaaaggtaatgccattgtggacgtaagagagatatcaggcgtctcttttgatgtcttttttgatgtctttctgtgtgttttctggaaatcttttccccatgtcaccatagccagaagagtacggagtaagaggtgctgagtcctgactttttgatgtctgttttcacctactggcaaaatcgaagtgcataaggcggtgagatcgtcgtccaggcagtgggcggtcaaggggccagctggacagcattccgccaggcaaatattcaccaataagagacttagcacggcgggcggtatagcagttcagaaggcggtagcacaggtgttaaaacattcctagcgcaccgccgtctataccaatttagccgcgcgcctccaattttgccaccgcccatgagctagtatcaattgctcctcgaggtcttgcttccctattaagcactccatttgtttcaaatcaaagtaccatcgcaatgtctacgtgcgacaataatgagggcggaaaaccgccctccaaaccaatctctatatctttatctagttcaaagggtccttcgaaaaagaccggtttcaacctccaatcctcaaatcgcggccgttccacaacttctacaacaaacggccagtcactgcctcggcgacctcaccagctcggcgacgctgatgagtccgacgaagatgaagcccccccggtccacgaggaaatctcaggattcgacattcacacaggcgtcgccattgccgcggacggacagacagtaacgggtgcgaagaagccactgatcatccccgtcacgagcaagaacaactggcgcgaccgggcgggagtcaatgtgaagaaaggcaagaagaatttgctgcctagcgaggtacaggctatgcaggaagcgcaaaagaacggacaagcaccccccggagtgcccacagtagagacagatacgcccagcgtggcgtacgggttgagctatgcacagcagtcagcagaccaggcagttactggcgcagcactgaacgaagaccaggccatgcctgatgcgaaacccgtcgagaccaagcctctcaccgacgaccagattgctatgcaggcgctgattcgagaaaccaacggggaggtagaacgtaggtcagaccttgtgattgagtctgctacaaaggacgaagaaccagttcactacagcgagctcggatccttccgaacagatgtggcatcccggcccgagcctgctactttggacgcctacaatgccattcccgtcgaggaattcggcgccgcgctattacgaggaatgggctggaaggaaggtcaaactatcggacgaggaaactacagcagtgccacagctgcagacaaggcgaaaaacccccgtgttccagaacgacgacctgggttcctcggcattggcgcgaaggattcatccggcggtaagggagctgaaaccgagctaggagcttggggaaagtcggctatgcgcaaggcgtcaaggaaacagggggaggagaacgataaggccgagggtgtgtacatgcctatcacgatgcggaataagaaaaccggcgagcatctcaccgaagcggaactcgctgcgctacaaaaggaggccaagtccaagcctcccaaggaagacgattggcgcgagcgacgggatcgcaaccttgagaagagcggtcgggacaaggatggagaccgggaataccgcaaacgcgactacgacgatgaggaggatcgttctcgccggaagactgggtcctcgcgacgtgaccgtgaccgcagtcggtctagtggccgccaatcttctagccgttcctctcgatatgacgatgacgataaaagcagacgggatgaccgttcctatcgggatcgagaccacggccgggaccgtcggcgggaccgtgatgatgataaggacgatcgaaggagagacggagagcgagagagagacaaggaccgcagccatcgatctcgagatgagagatacagcagctcgcggcactcgtctcactcatcacggaacgacagagaccgagaccgagatcgtgatcgcgactctcgtcgaagtcatcgcgatgattaggggctagattttttggcgaaagattaagggtattgaggcctttgtacacgaccaattgctgtttctttggagatacatattccctccatctagttattttaccatgagactcaaccaaaagagataccctgaacagtcaaatcaaaatatatatggctttggccaaagaacactttccatgatacactgttcaattctataaagagatggcttttatccttcccacccatggtactccaagaacgaaagcgccaaattcaatgtacaaacggggcaaaaggctaaagccagactatgcttccaacataataacgtccttctcatgctctccctcgtcgctgacattgcccacagtcaaatcacgaagaccaccaagtccaacgccaccatccatctcaccgagaacccactcaaccaggtagctgtcatcgaccagctcctcaactcgtcggtagtgcctctcagtgtacgcagccagcgcctggagaatatccttcagaccagccgcggcacgaccctccttcccgcggacggactgggtcgcaagctccacgaaagtggacgcggggtaagagcggaacagagcatacaaaatgcgctgtgacacgcgcgaggtgcgtgcattggtgttccagtcccggagacggagcaggagagtgcgcagattggcagggtccaagttctgcagtacctcatcaatggacgggttaccggacagactggccgcagagcgctcgcggtcctcggccgggagggttgggtcgtctgcggtgttgatggcggaggtgaagagcgagagcaatctacccgggtggttgagttgcagggccagggtgatggcttcacggtaggcaccggcgcggatgtagttctgcagttcttggtcctgttcgacgcgagcagaactggcgttgacagcggctgtgtaggtggatgatgtcgtatcagtccagaaggtcactgttgcgtcggcagaaccggaggcaagggcgtagggagtggtgttgaacttggaggagattggcttcacgtctgcgcgtgagccggacggagttgggctggctagcgcccagactcggtcgatgtggttgtctagggtggtttcgagttcgcctgtgtagggggaccatatcttgaccagaccgtctgcggccgcggaggcgataaggggatggtcttgggtggcgtttttgcgtgctgttgtggcctcttcgtcatcctcgtcatcatcggtttggttgttcgagacctgcgggggtgggagccagaggactttgagaacactgttggtatgaccctcgaaagtcaagagacagctgtagtcagacagactccacagtttgacggtcttgtcaccagagcctgtgactgctaggccacggcttgtgctagtacgtgaatctgagttgatgatcggtgtgccctgcggggcgaatcgcaccgaccaaacacctcgcttatggccacggaggacaccaaccgacgagccttcgtcggcggcccagatcttcacggtgcgatcttgtgatgctgaggcaaatagctcggacgtagaatcgacatcaatagcattaatatctttttcgtgagccttgcgagtatagacggccttaggatagtgtggcttttcttctgtcagtggagctaacttgcttgtatcccatcgcttgattgtgcgatcttgcgagccagtgattaaaaatgctggtgggtggttcaaggggtcgttatatgcggcactgccaacaggaggtggcacacgcggcagggcgattgctcccaacgattcggcgtggccagtgaatatagcaaagcaagtataagaggatgtctttgggtcaatacgccaaagacgggctgtattgtctttggcaccagttgctagccagtgtcctgaccaatctgcatcaatgcaaatgataatatcgtcgtggccttccaggtgtgtgacatcagcaccgaaatactcctctccctgatttgagggtcggtcttccgagggagcaaccgaaactacacgaatgctctcggtgttggtggccaaagcaagcatagatcgatcaggcccaatgtaagccagatcaatgatctcgtcgtcattgccggaaatacggcggataatcgccaaaggcttcaaagttgaccctggcttataatcagacagcgactcgagcgagtggagccgaagagtctgatccgcatgaactgtaaggacaaaaggcaaaccaggggaatactggatagcgacgacgctttcgaactcctcgccagcctcttgttcctctgtgatctcacttccacgattgcagtcccaaactcgcaatttgccattttctccacctataacgcacagactgctatccgcaatgaaagccgcagcttccacgctctccaaaacaggaatgattctgcgagtcttccaagtacgcgcatcccagacgatgacagtcttgtctcggctggccgagatcaatgcgttctctgacggagaaaaggacaaactgcggacaagtgaaacatgtgactcgagcgacgcaatggactttctcttgtgcagatcccatacacgcattttgccatcttcactgccagatgctaggcggaatcctgcagtagagcccgtacgggcggagctttccatatcttcatcatcatcctccgcagcttgttgcttagacttgttctttttggatgacttcgcatcgctgtcggcagtaggaacctcgaaaaagcaaagcgcagaaatgacaccaccgtgaccatggaaagtgtgagtgacaaaaccacctctgatatcccagaccttgattgagccatcagcaccaccagtggcaagcagtgtaccagtaggatcaacagcaatggtcacgacgggagctgtgtgaggcttaagggttcggagaagttttgcttcaatggtctgggaagtctcgtcaaaagttgagaggccgtagattcgcatggacatcgagcgcgagcagacaatagcgtgtgaggcggaaggcgtgactaggcgaattgttagtgcgctattctcaattctcaaggcatagaatacttactggccaaacctgtgacaatttctccatcctgtagcgattatgtggttagcgctttgcaattgacgaatatcccaaggcgacaaaacatactccttccaggctagcaagctggttgccagtctccaaatcgacgatcaatgcatcttcgcccacgcagctcagcaagatgcgcccactggcatccagcgcagtgctaccgccggtgtaaatggggcggagcgtacgggacgcctcgaaagtggttttgacgatagctttcgacatgactctgtaatatatcggcgtaaaaaagcagaatttagcacgccattggccagtcgaagagccgtagagattgaacgatcgcaaaaaactgcagctcgagcgggcaactttttttaatgtttgcactgtttgtttggtgataagatacggcttctgcctcaggccaagggcagccgcataaccacagtaaccacatgctcaactgctggtgtttgtctgattgtgcttcatcgcctattacctttacatctacgggttccggcaagttttgcacaaatggtgtactagaaggcgatgtgactacaccactagcccagtgaccttgcacgacatgggtagacaggcttatttgaaccggctcgcattggtaagcttcatgttttactcaccagcttttcctatatttgcagttgggaaatcttgggtctatgggctgtaatccaacttgtttcagttcgagaactttatggctttctgaaaccgaaccagtcaccacccggccttgtctctttgttttatcctgatatacaagcccatcccaaacgcatcttcccatacacgcagaataatgcctagttacaaccggatagtataccatattgactgattttaagggccggtccccatacgaacctcccgacaatgcggcggttgacccctccaatccagttcgacggatttccaacgtccatgcagacaattatatgcagcaatatgatactcgagggcaccctgttaatcccgagtctagaaccctcggaagagaactccgaagagcaaagaatgacatcctttcaacaatggggattgtcgtcagtggagaagaccgaaactctagcatccccaatgaacaacaaaagatcaaccagattgcgagtgaaaatgacttcgggctggtcataacaactctcgatcaactgttcatctttttcggtacctggtggacctcttcagtcaccggtcgagtacaggtaaatgcaccaagtaccttaggtgttgattgggctgacattagagacttgatgttcagacttaccgacattatgcccattccgcattagtcagtgtcgtacagtctgagagagacaccgcagggattcttagcttctatttttcgggaattcctgcctgggcaatgtccagtgggttggctatagctcgtgaaaccccgatgaaacgggtgtttgtctctctccgggactacgttcaatctttgacaggcgactcactcggtgttcgttctcttttcggggttttttatacagcgtgagtatctcattcgcccgttcgaataggaaacacaactgattacgaataaagggcgagaaatgctgtgctcatattgtctatggagttctacatgtactccacacttcaatccctttcccttgtatccccatatggaattcctggcgtgcaattcctgcttcccttcagcggagaatccttgctacagctgccacccttgcccactgatttctcccctcagtcaatggggacctcactcgtgaaattgttgctctcccctggcgctttagtgtttctctatggctactacctgcgaccagagcttgaagagcgcatatatcggttgatcagacgacaccttccgaagccagctcttcctgatgaactttcagtccgcgttgcctttgaggaaaatctgatcgagtgggtagtgcccaccctgggccgcagatcagtcgaagaattacaccgcggcaagctcacactatttgaagacatcaagcttgaactgtccatgcttcgaatatgggtatcatcgcttcttagaccgagatctacccaaacgttagagcagcaagctctcttgtcctttagagacgaaaggattcaaaatctacgcaacacgattgagctgttgcgacatgaactcggagaagacaaccttgtttccgatgcaggaccaaatgatcccgtgcctagaccgccggggattactcctgatgcccaggttgccgctcttgcatcacgagcacgaccacggccgcaggatgcaacgcatttgactcaggcagaatcagttattgggctgaatcaagtgcttattaacgaagatcgtatgtctcaatcgcctggggaaatgagcaatgactatttctccgagatagctactgctggacgaacgagtcttctctcggccacttcaaccccgcaggaccaaacagcccctttgcaaaatggtgaggaatttgctatggaccgacagaactcgcggtctaatactctcttctctcacccatcatcaccagaaacatcacctcctacgtcgcctcgcgtaagagcatccttgattcaccagagctccgaagttatcacgatgcagcttgagttgatgggcaatcggaaccatcagccccagacccaagctttaaatcccgcccagctgaatggactggcacgaaatgatatgtcagggtcaaatacaactccagatgccatggacagacgatccatagccgagttcctcgaggctctgatcttaagtcaggcccagcgtcaggtccatcagcccccggcagatacggacggcctctcaaataccaactccgggccatccaacacaaccccccaagacttaggtgcctctggattagaccctcaaaatccggccccagaaactcaagccaccaacgctccagctttagagtcaatcgagggagcattaggatccatcgttcagaacattctcccagatggcgtggaagaaccaaatgacgaagagccctccaatgaatcaaaccctgtcccagataatgaagacactcaatccgacaaccccgtccagccagtcctaccctcttctttgattcctggacaaccgacaaacacatcgtcgcaagtccaccgcgtcacccttctttcggcatacccagtggactcactcgcatctcatctcgctgctgcaatcagcggcatcatactcgcgccacttgaagcactataccttcgctcattgacccgatcctggattatctcacatccttcctccatcacccgtctctcagatgttcatccgctgggtctttggtttggcggaagaacttggccagatatgtatgcttattcctgccgactcgtgctcatgaggggaatgcaaattgcgatgagagcgggtatatgggggttccttgtgggctcgacaatgaggattgggaggaagttctgcggctggggaaccttgtgatgaacccttgtttctttaagccgcctagatacctaggtcactctaccatgtttcctctattttctcgcactctgtatcttaaccataatattactttaatccatatgcaacatgataggttgatagttgtttccatcagtcaggctgaaaaatttagtaccaatgtgttgtatttcttttgtcttctgatgcagcatttgcgtctactttaccgaacgaacagtcgaagatatcaaaaaaaaaaacaaaaacaaaaacataatttcgtcattatttgagggtacattgcatttgctctcaaaagatacatgtaaacacgtagaaggcaatagcaagttcgcagcccgagccaactcctcagataaccatctcagatcatgcacgcccctttcctttgttccctggcaccttacgccgctcccaaaccataagatatccctcacgggcgaacagcgtctcgctttccgcgcgcttgacgaacaaatcctgaatctcaagccactctggaccctgctgctgcttctctgtggaaccgccatttttggcgcgagtgttctcagcctccatagctttatcgtgaagttggacaagccatgacaccttctcgctgccgccacctgctccactggaggaaccgccggctcctgacgcagagttaacacccttttccacagcgtcatccattgcaccgggtgcggcgatagcaggatcgaggatgatgtttgcgacaagatcatagaggattggatcacttggtgaacaaacatttggatttggctcgacatagggggacatatccaaggagtgcggagagggaaaggtgacaatggttgggtttcgctcagagacaaaacggttcttgctgaagcgcttgatatggaagaaaaggtaaggaggaagagggtggaggagacggtgtcggacacggtgagccagtttctctgacgccgtgtagccgttatatttgttcaggagggtagtcaagggaacctgtgggatgatcgactcccgattggcagattggaagagaggtgtggggggtaggtccagtgtgagaatgaggaaaggagtaacctggctattgattatgccagattcagtgaataccaaacgggcattttgggtgtcagagtgagcggtgatagcttggctttcgatccgtacacgaccctgaaatgctgcgtgaacaacacttgtgggtgttggtgagggcttcttggatcctcctaaggcgaggtgcaggcagttcaaaaaccaggacaagaagtccacaggatctgcctggttcgtgagagtgaaacgtttcgaggatcgtacggcaatctcctgtagtaactcgtgcggagacacatgtgaccggaacgctttagggttccatagcttgcgcaccagcgtgctgaaacgaagaattatctctggtgtgcctggtgtggggaactcgtggagcagaaagaaattgcgaattggcaaaacatgtgccagtagttgagcgactacattgacgtagtcgttggctttgatgttgttcataccgacaaaccctgaaaagagacaattagctaaaagagtacttttccgtcctataatggtagatgctcttacctggtctgtactttgaccctgaaaggtcccaggcatcatgcacttccttatcgagtttgaccacttggttttttgtgtagtgtggatcaaccacatacttgatatcatccaaactcttgttgttgacctcgtatccttcaggcaaaacgtagaccttcttcgtgccgatgttgatgaagacgtggtgtccaacttcaagggcgtgaaaatatgcatgcgatttcggaccacgaccctggaagtatttgccgcagacgaggcatgcgtacacattgatgtttgacaaagtgacggagcacagcttctcgaaatcgaagtccaaaatttcgcggttgatcgtgtcgaggtagaggtcgccgtagccttccatgggagcgctttgccgcttcggagcgctgagtgcaggtgcatcttcgtcaatatccgagagtccaaggggattttcgccctcctcaagctcctctctttctatttcagctgctccttcgatatccacgccattgagatcgtcctgtgtcaactcttcgccgctcgttcggtatgcgggcactgcgccgttgcgagaatcggggtcgttgccctcctcgacgcgcgcccttttcaaaacaggcgagccagaggaatcttgctccaaggggagctctgcgtgtcttttcgacattgtgagatggtttggatcgaaaagttggtgatcccggggttctggactttccgatagctcgggatgcgactgcgttgcaaacaagtcaaacacccaggccaatgccaagctgtgtacgttctactccgtatacaaactactgttcattttgattataggactgtatttgcctattacttatccaagattatctaggaatctactccttacttgacctccgagcttgctacagcctaaatcatgccgaccgttggattatcccggaatcaaagaaaaacgtcgtaagatgtgatacaacaaaccccgtcgtttgtcgaccttcaagcactccggaccaccttatcattatccacggggacttcttgcacgccatcctttgtcacgaccttcactagcatctgtagataattgtgtcagaataacggatttgctcatggcgtttgaaagaacttacccccttgtagtcaaagggtagtcggcgcttcagctcgtctgtgcacagggtgaggagcgcaaggccctcctcgagggagcagtcgggatggtgatgtttgtcaaggatggagaggcagtagtatctagcgaagtcagcatcagtgatctcttgcctggagtttcgtccgtcatagcaggccatgaaacatactgggcatagccgtgggcagcatatggtaggggcgccagcgacgctaggtaatcaatccagtacaggtgaggcttctcagtgaccggatctataccacctagcagcaggtttactgtgtagggactccgtgaccgcaagctgcgcgccaattctccacggacgaaattggcaacggcggagggactgagctcagtatcattgcgcatgctgtagagtgcagcgttggcttggatgtattcggcaaattgaactaacataggtatatcattagcatcttgtttgtctcatcggagaagctacataccggtatctccagactcgccagagaaagccatcaatgtgttcttgttcaactgtcgtgtcttatcatcctcagccttcagaactgtcgggcctctcattgcagccttggatgcagcaagaatgacgaagtccttgccggcgatacccaaaagaacctccctagcaaactgttagtgacgttttgtatcgacgagatgaccataaacttacatgtttgcggtatgagagataaaagaagaattacaagcaagcagatgatcagagaaggcgaaggggagtagtggtcaagtgaggaggaccgcgcggtgagcttgacgcctggagctcccgtgaggtcagctacccgctgagtcagccgccgcttagcgcttttttttctgccaaaaaaaagttgaagttttgatctccgcagtccgagtctttcgagaacgccatagattcaatttctttatacagagatcaagcaccgacaggcttgacaaaagtcgccatgtcgtccttttttactgtacccaattcccagcgcaagaggaagagagacgaccgcgccggagccccaggatcaaaaaagcgaggcgtagatgccaaaaccgacggtggtcgacgcaccaaagacagagaggaatcgatctcgggcagtgacttggacgaggatgccgcaattgatacagcagagtcaggagacgagagtggatcggactctgaagatggcgagaccgcggcggatcgaagattgaaactcgctgaacgctacctgagtaacatccaagaagaagtcgacgaagctggatttgatgccgcggatatcgaccgagacttgattgcggaacgattgaagaaggacgtcgacgaatttaaaggacggacgttccgtcaaatcgcagcgaaactatccgttcccacggcgccccattcctttttccgctcagatacccagtcaaacaccgctatcgcagtccacccgccatttgtttacattgtttccaaagataaaactttgaccaagtgggaattggctacacccagtgtaccagactctacagaattgaacggcgataatgatacttccaagcgggctccgcgcccccagcgcaagaagcccaagcgtgtgaagtacgctcggggtatgcgcaaagttggcgaatcaggcgaggatcaaggacatacaggaagcatcatatctgttgctgtctcgccttctggaaaattcttggccaccggtggaacggacaataagcttatcatctgggatgcagagactttgacgccaagcaagacctttttgcaccacagggactcggtttgcagcttgtcttttgcacgccatatctcggcgatgagttctggagagcagttgttctccggttcgtacgaccgcacaattaagacatggtccatcagcggagctggccacgcgtatgtcgaaacgctcttcggccaccaggatcatgtcaccggagttgctgccatgaccattgacgaatgtatcagtgttggtgctcgggatcgtaccgcccgcttatggaaggttgtcgaggaaacacagctcgtgttccggggcggcgcctccagaaatgccccttaccacgagagcaacatcgactgtattgcccccctcccacccactcacttcgtcactggctcagattccggctccctctgcctttggtctgtccacaagaagaagccactctacaccgttcgtcttgctcacggcttggacccgatcccccctctggatgtgttatcacccgagttagacgaggcgactgccgcccacaacacgcgccacatgcgcccaatgcctcgctggatcactgcactcgctactctaccgggtacagacgttgtcctcagtggcagctgggatggtttcatccgcgcatggcgcgtctcagaagataaaaagacacttatcgctctgggacccatcggtgcaggcttacccggtaccgtgacaccaacagacatgccctcgcagcaactcaaacagaccctggctcttgataccacccctgtggctgatcaaaaggagccagagccattgatcaagggtgtcatcaacggcatcgcggtctttgaacgacgccctgaatccgatatgcctggagctgaaataaaaaagtccgagaccgagcacgaacctcgtggtttgtccatcatcgccgctgtcggcaaggaacaccgattggctcgctggaagtgcttcaccaacaatttctacgagggcgccacttcgggaggccgcaatggggctgttgtcttcgaagttccgtttgctactaatgacaccgtgaaggctgatgtataaattttgttcataatcttcttgtctcgatcttggtcattggccgaggataaaatggggagcgttgctcggggtcaggtgtatttggagtcacatctgtgtattttaccattttgcatatgtatcgaatttcttcggtgcattgaagtatttcaatcatatccccctttcaagcaacattgtccctgaagtttacacttcgtgattagggtaaacgatctgaaaaggtgcataggtacccgtttataaccttgcttccctccaatattgcaacgtgcgttatttcaacaaccgataaccaaagactcctacgacttgcctccgtgatgttgagatgtttgctggccgtgcttgtcagtttacttcgcttgtggatagggtatccaccaggtgggtcagtggtaaatctatttgtctactctggatggactcgtggactgttgtagggacatgtggttatcaaagcaatatgagcaataacaatactcagcaagccagtaagctttattaattcggcgagggattagaatatgagaatcaaggatttaatacggtaaagcccggtgtctttttcataaactttgtggtcactcttcagttagtgccaagagactaggttcgtcgacttcactgggaaagggcgacaaaagatcaagatcgaaccgaagacggataagtaggggtattgtattcgtggaatatggccgagccaataagaaacgaaacatgaagggtccagccattgaaggcagcagaagagaaaaaagaaagagaaaaagtcgcccttttgatatcaaaatgaagacaaaacgccagccatgtccactctcctgttatcattacccaagcgccgcgctgaagtcaaaaggaaacattaagtaggccgatgaaatgcgaaagcagatgccgcgtcggcggttggaagatttttttaatatggagagaatctggcccgtcgcctctgtgtagctcttctcactgggccgacaggctgatcttcgtcggagtcatcgacggggatcgcattgtgagcagtggtcccatgtgggataggacggcgcgcaccgggtctagcaggcctaataggcggcgaagattcctcttcctcggatgagtccggaattgtttcaggtggaggcctcgctgcaagccatgaagcatcgttgggggctcggaaccgttgtggatattgtggattggcttgacgaggccgtgtagtctgaattacgtcttcgtcggattcatccgagtcttcatcgaccatctccctgtcgtccgaatcctctgagacttcctcttccacctcttcatcagaggaggcatcggcatcaaagtaaggtgtggtggttctgtaattgagcgcagtcggtattgaatggcggccaccctcagcatcatccacaacggtgcctgtggaacggtctgattccgattcatacatatcgccactcccgagatgatgggcttcgctttcaatgaacgaactcgtgggcagatggtcatcaatgaatgagtctgactcgtcatactcattctcctcctcctcttcttcttcgtcatcttcttcgtcgtattcacttccattggtgttacctgaagcgagatagttgtcatgattcactgggagcggcgggcccagtgggatcatgggaggtccatgtaacaagttctcaagccggtcgaaaagctgccggtcagcacctggatgccagttaggacgcctagggaaggtaggcccgtaatagtgaagcgcaaagttgccccagacgccatcctggtcttcaatctcatccaagtggtcagactcccctagctcgccatcgccctcgccctcgtcctcattctcgtcctcaccctcacccccatccataccatcatccatcgagtctaggtcggtctcactgtagtcggccgaatcactgtcatctgtctcagaatctggccgatactgatagccacatgatgcgcaatcgtatccttcaagttcccacgagcagtgtggacatcgaaccactccgtcttcggggtcaggtttgggtgggggatctttgggcttgaaaagacctccgaacagacctccttcggttggatgattgttggccttgtcctggtctagtctttctgcttcgtccttttggttttttgtatgctctgtagtcgtttctcctttgtctaaaagctcagctcgacctgtgaaaatctgcacaacggctcgaacctgtaacacgagagatatgtcagatacaatgaaatgattgaagattatcaaaactcaccagataagctggtgctggctgggttttgacgggtgcccggcaatccgggcatgttcgctttgatcttccaccagcaaaccatgacgatagacactatatgaagaattatggtcagcgaagagaattcacgacagaacaagtagaaaggactcactgagtagcagaaagtatgcccgcaagcgattgtaaacggttcgtaaaggggacggatgcatataccacactgtatcagagtgcgaatatcatcgacatggccttgaagagtgttgaccagctagattacgcgcgtgagtttttaggtcacttgaatcagatgcgggacttgtcttactcccgatgcctcagccccagaaccacttctagctgccattttgaccttctagggctcgtcgagagctgtggtttccacactaggagcgtggcccatcaaccgaagtgcgtttaaggcgtattggggtgatgcgcgtgtgtcaacaggtacggtgggggtcccggaaggtaaaagtttcgcgaagtggcaaggtgtgatcaacagattttcgcagagacgaacgctaggaaatcgaggaacacaggcgaggatagcgtgacggtctgagattgagagaaagacaccgggaagagcaataatatgatccagattctttaagtgagagggcaggtgttttgtggcctcaggcagccatcacataatcatgaggaagggggcggcgcttcgagctggcaactttggaagtgactcgtcactttcttttatcgatggtccttatgtgacagtcacttctttgggacttctggcgcttgtttaaaggttatttattgtgaaaatagtctgcgtgacaagtgcaactatacctctcttacaggtgagagacttttctatatgaatgaagcctcagcaggtcttataacacaaagatgttacccttgtcttgacttcctttttacctttattgttggtttgaaatcaggtgagccaatagataattatttctattcaataatatagctgatcgaagcatatatacctcacttgacatatacatctcgcaccaaccggtttactccctcgacagtctccgaggcactcacaaagactccatgcagcatcattcaagccgaagcctttgcttgaactcgaggccttttatatttttaacatctgattaacttggagagaacattcatttcatatcatatcattatccaagcgattgcctgcatctcttgagatcttcttgagtaaaaaccaacatacaacttcaatttcctgacgaagattaaagcactaaatcatgacccgaagccccaaacgaggcttgcaagaccaaaatgaacaatcatatcgttcaaaatcaatgatcatctcattgcgagctcttcagagccatatggccaagagcaggccaaatatttttcgctcccctagcactggtgtctactctgtatcttatatctttgcttctctgccgcatcatcaaggatccccaatgtatcttccttgctactcacggagaagttgatatggtcaatcgaagtctatggcagagacaaggtcaatatccgcattccttgagacaatgtccagagccttggggcttttgtatgcgtcataataaatggcgcacatctttgaatggtttcagcaccttatttcattgctaatcaatatggtgaattcactccgctgcgtatcccccccgcaattgatattgggacagactgctcgaatattcatacttctttcgcacctctgggttcaaaatcccctttatcatttgctggctagtgagaacagctcgggaacactaataaagtgtttgtgcattgctttttttcaacttccatatgatcatttatatgttgtagtgctcgtgaatatatatgtggagtataaactaggaagttgcattctaagaatggaaatgtaagctatttcagtggatccacaaatcagacataactagaagccatgtctatttagatacttcattctagacttgtatcaaacccaaagtattacataaaaacatggtgctagttatgcagacctcgggattctacatatggcagatctccgcgccaagactgcggatccccaattcttcttgcgtccagcgctaacttctgctccaatcaacctctacctccaatctgatcttcgagcaacgctttggcattctattctatttgactatatcatttacctaaagtgtccattgcaaagacaggagcaataagaactcattgcacccatggcggccgagtcaacacaaggagacactcacgacaaagcgtgggaaagagcggagaagaagttcgcacagtatgtttcaatctttcttccctcctctatacttgtttgtccattctcaaaacatgatctggcatgtctgaagccatccgtgatcgcgggatcatcttacacggactatggggtcttgagagccacgcatagcaacacaggctagcccggtggttgcatctattcatcgggctgaatacacgtggcttttatctatactggtagctaactagctaacttgcgatattagtaaaaatgctagcgagtactacgacccatgccaagacttcgcagatcggagtctcaagtgtatgaaacggaatgcctatgagcgcgaaatgtgccacgattatttccagtaagtcggtaattattctgcgatttaattaagactttgacttgctttccgtgcaatgtactggctttcgatccacttctggccagcttgtacaatattgtcatgattatcatatttgagctttcacactgactgatgaccttttctagagcttatcgtgattgcaaaaagaactgggtaagttgaatatgagacctttgccatcacctcagcaatctcccgtctcgggcaggctatccgcgagatccattaactttgattcgatatgcgttggagcatcttcggtcgctaacaaggcacagctcacccagaagaaagtttctgcaacgcctcagcccaaataagacatctctttcatctggaccatccttatcgaaaagatcgacaactcctgactggcaggatccctgacatccccgaagcagttgttgcatgccgatgcgtagggtgtgctcgttgattaattcaatattcagaagcctgtcaaagctaaactcctaccttttgttcaggtgataagcattagaattgctgtcgggcatcatgatattgctaggctggtaagaaattccattcctggcacgtcgaaacgcttcatcgtccggtgctgacttgtgagagaagcagtttctctattgaatttgctttcctgcttttgaatcgcatattgtactatcttttgaatgattttaagcttgtatattaacattttgctatggtcttgtctatttcgcacaggtgtagtgcttctgatcttcatattcggtcgagtacgactcgtgcagaatatgaaacataactccttatttatattcacaaggtagtcacctgctgtcatgtaaccaacaatttgttaacatgtcccggttgacgtccgtatagacttcctgggtttgttgtcttctaaactcttttcccctttcgtaatgacattagtactccatcttgacctcgctgctaaaagcctgattacgtcaaccatccgggatgtcacttcgtcgcctaggtatgatattgaactatcggtccacctggaatcaaatgaatgaataatggtatggatttctcaatgagtgtgaagataagaagcagaattccgcccgaccataccgctctctaagagagacgacagaacatcgaattcccccgatagaaatgatcctcttgatattctctggaagacagccattcttcctactcctccatctccattgatccggtcgaatatcttcaattcctgtcttcaaattgattgatccccttaagaccagcaatcaagagaaatcgaccccagtgatgtaacggaaggcttgttcatcaagcacaacatcttgcatgttaggatgtcggacaggaacgttgaatagagcacaatacggtaataccattggagcaccaacaactgtggtcttggtcacatcaacttcagtacataaatagtgctgctgcatgttaggcggcttttggaggaggggtggcattggattctggcggaggatgtcgatgtaggctttggtcaagggtcgaggggcaccgggcggagcaagctgccattgctcaaaatgtatagccgtcttcttgacagagatgagaatcacaatgcgcacttctccattagaggctctaaacctccattgagaatctttaagtagccttggtaggctcccagagacccccgtttcgataaccagggtaggccattgaaaacttgtactagaagggcaacgtgcagaggggctgaaaacttggtctccctctttgccccgtgataaggaggtatatcgtgtcgctccgccctaataatattcattacttagtctcatgctgatcagttgcagagtgactctctgcacgagtgccgaagtggtgaattcatggcgatgccctggtatcacgcgtaaaatacctgtactaccttcaaactcaaaccggtagttcacacccttcaaacaatcatgatcctcgaagagtcgctccgagatgcgatgggttgtttggagtagaataagaactggtttccactctcttcctcgtctttttcgagggtctcggcgatcttctcggcctcgagctgaacatatttcagtcggctgaatgtgcgagtcacggcaccagatgggagcgctgtcatgatgtcaggcatggtacgggcgaaagagcatcggaggacatgatatcagaggaagaaattcccataaatatgggacgatggactccgacccagaattagatcgatggacttgtcatttctatttttgagatacatcatggcagtatggtgaggggaccgactgaccgcctaccctttggtcttcttccccaccaaataaaaagtgaccggagtcgatcagtccactccaactcagatcattgaacttttttagcccatgctgtgcttcgcacagtgatcagatcgttctgcgaaaaacgccaattgaagaatttccctgcacatcgagcaaaacctccaccatgagctccagcaatgacgcggtgtttctgcgtcgtaacaaccaaatccaagatgccattgactcccagaatatgaagcaggccttacagctgattgagaagcgcatgaagaaaggcgagaacactcatttcctgaaggcgagtgatttttatcattgtactccgaattcaccaccactacgacgtcgttaactgtaaagaaccaactaacacgtgagataacaggcctggaaagcgaatgttctcttcaaccatgcggatgtgacacataaaaagaagggaattgcagaaaccctcgagctgtgcaaggccgatccaccgatctcggatttagactctctcgacatactccacagtacgctgcgaaatatggatgactataccgagcttcggagcgctatatgggaacgagcagcgaaggcaaagccacaggatcgtgatcttcagatgaggtggttcaaactcggctatgaggctggtgattggaagtcagcccagaaagtgagttgagacgaagcatatgctacaccgggatcatatgaaggcctatgttgctaacgagtgcctcctttcttataacaggctgcaatgagtctccaaaagaactttcctcgggagcgaaagtattatttttgggccatcttcctctgttacctcgtttcggatgacaaatctagttcggacatggaccgcaagttgtttgggacacttgcctatcgccttgctcagaaagcagtagccgaggttccctctaacccggtatgtgacttttttccaagattgcatgtcactggaagtgaagacgaatgaaaattttggacataaatgactgactgattcaaatgatttactacagaccgaattgctaagccctccgagagcgatacaaaccgccgaggaacttctcttggttgttcgaattctcgaatcacagtctcgttgggcagagattgtgcaggttctcaatagtgaaaatactggtctcagctctcggattgttaataacgacaggaccttcatgttagccaaagtcactagcctgggggctgccgaactctgggaagaggggcactcatacgtcaaaggcctgcttaccgtgcctgaagacgaagcagagcgcaaaactttgcatgagcgggatgattggaaatactggaacttgctcatcctagccgtgcgtcgtcttgaaaaaagtccagggtatgtcttccaatatttttacttctacaccatcaaaccctcagctaataaatggttgcttggttcataggctactttccgatacgcagcagcatatcgagaagttcatcgaattcagcccaaagtcccgcaacgcgcacatcgctattatggacatagtcctaaccggattcaagcggggcgagcggacagaggatgatctggttattgcgtgccaaagatactttgaccaacacaagcacaaactctatgcttttaaagacttacgaggggtcttggagacccgtgatgatgccttgattcaccgagtagcccaaaattgcttggacagtgtcgaggggaaacctgtacgtgcaaattctgctaaactcagtcaatgcgagctaatcaaaattctaggatgatgccattccattgatcaatgcgtacaagctgcaatactgcgaccggatttcagccaataaaaacgtattgaaatccagtatcgagacccttgtccgcaattgcctttacttctacgatgcattcacgcttttagcaaagacacaggacaaaaaacaagaaagccaaccagatactgcttctgcgatggaaagccgacccacagatgacttctgcatcattgccgcaatggcccttcttcagcctaacacagctggccaagcatctgagaaagtcagtaacactgccctgattcgcgccgccgggattctggaacatcttttaatcgactcacctcataactacgaggcgattcttatgttgattcgaatctatcttcttctcggcgctggctctattgctttgaggtggtttggcaagctgtctatcaagcagatgcaatatgaaagtgttgctcataacctctttacccgctttgccaccatccaccctcatcccgcgcctcttatagagggcggagaatacaaggactttgacgcgcaagttgcattcattaccgctctcgacttttatcgtcatgcaagcttcactatcaataactctttgataaaaggacttgatgatgggacttacgtgaatctagatgacacaattgagcttcaaaaacgtatcagggacagtatctgccggagaatgtgggcactggacttacgacggatgcaaagaatccgcaaaggaaaccacttggcccttcacgaggaaatcggtcagcaattctcagtctcccatgtactcctgacatacttgaatactaattaccctatagcccagaatacatcaccggctcaagaccagcggaagtacgatggtttcatggacctagaacgttgtggcaaacctgcatttgagcaccgactgcgcgcaggtccggttcctggggtaagtttgttggcttgagtgacaccatggcaccgactaatgtgcatataggaaaattggctggcgtccgcccggtttactgatcgacttttcagtgttcttgagagcatcggcagtcagaagccagtcgtcttggagccagagctgcctgacatcggcaaattatcgctctcccagactgatgttgatcacactggtgccgagatagatgcagccaagattcacgtagaattgttgaaagtggctatgtttatggctggatcgaaggcccatacttccaccgaaattgagactgttcttggcgagatagaggattggttgaaggctaagaaagaggatctagctctggaagatactggaaattctccccttatcatgaggacgaccgtccacttcagcccaggcaccccaggtgcaccgacatgggaatatttccataccatttggaccctcgtggagaccctcaaggctctatgtaatattttcaacctgaattctcgaaaggctgtgaagaccgccaaactccctgccgaacaaatgaacggactgaatactcttgttcgtgaagttttcgaggatatccgtttgaacacccgaagtctgaaacagagccttattgaatcagccactctcagtacactcattgacatggtcaagcgtggggatacaactgatgagtacgagaagccgcttcaagaagtcttggaaaaggcgatggacgagtccgcgctcgaattgttctgcggagaactgagagagagctgggaggaggcacttgacggagtgctggctgccaggctctaattctgaataaatcatgtgtctatgaaaatacattgttagagtacatgtaaaacaatccatgagagtgttgatatcaacaagttcagatgaagtccaggtagtaagaggttgatctataaaaggagggcaatatctatcacgtgcacatgtcaagccacatggacttagttgcctgaggtgtcagtaatgacgctagtcccgattaacccagccctagccctagtcactcgcctaccgcaccaacgccaaggctccattttgcggttccaggcaaaagaccaggcgaatttcacacggctctctcacctcctcttcgacaacctccgccaaccccttcagtcaacaaccgtcgagatggccgaacgctccggaattgtggtcggactcaacgcgggccgggtacgttcttactgtctctttgcaccatgtttgtcgctcgtttgaaggtctcccaaggtctcttcttttcgttcgctctgttggtcaacacaagatcagtcgggtcatggttcattgcggaatcactgggaaatcatcgcggcaagaaggattgcgaataaatcgccgaacgaagaatatcagagactcactgggaaaaatttcgatgtcacgggaacaatattttgaattcgactttggcaccggtgccagcactcgccatgcacgcaaccctgatccgaccacgctatgaaccaccccgacagacagacacgaaccgcgaattgaagagaacattgggacctgcggctgctacatgaaacttggcgaaacagacatactgactgggtcctgatatagaaaaccaccgccctcaacacccccaagacccgcatctcgcgcaccaagggcaagtcttcccgccgcaccgctttcgtccgcgaaatcgcccaggaggtcgttggtctcgctccctacgagcgccgcatcattgagttgctgcgcaacgcccaggataagcgtgcccgcaagctcgctaagaagcgcgtacgtctactctcaatccttttcccgcttttgtatggtcggctctgttgtacggattacattggatttgggggtcgatttggtcgaggtcttgctgtatacagaatggtactgtatgggccatgcatgtcaatcatgcagaggaagagtcatctcaacctctgcttggacaagcccgtgcaataactgttctgtttatagcgactaagattcatgcccaaacctaatgattccactattatcagagcctgtcgatccattgagtcgacacttttgctaacttcgtgtctagctcggtactttcggccgcggcaaggccaaggttgagtccatgcagaaggttattgctgagtctcgccgcaccgctgctcactaaatttccggacccgttcctgtttttctttcgttttaacgactcgacgcaaaaaaagcgtgattctcggatcggaaagggggcgtgcatgaaggggaaggcaactatgggattccttctctgtcgtatggagtgaaaccataatgaaaacaattattcaaccattttacgtgtgatatttgcaattgagccactttctaaatggaggtttacaacgtagatggagaagcgtatacctttggctcaagccgagtgaggtttgattccatgtaaatatggatgcagaggcgacaacatttcactacacatacaccattcatttggtgttaagcctagattttcattgaggttatctataaatgaagtatgaaaggcatgtgattctcaagtctatacgcacatctaagacgttaatgcgtctcgaagggatgcgccacatagttaagtcgtgaatcatcaagagcagcacatgtcgctcccctgaaccaaatacatttcattatcccctttcatttcttacccggtagcttcagccacttaggcatagcaccactcttccgtgccccgccggacttaccaccgccctgagcgctactcggacccggctgtgagggagcaggcacatcttcttccttgatttcaggcggatgctccaccttgagctgttgagcttgactccgaagctcggggcgtagggtctccgctcggcgttcatgaacgaacgaggctgcgttatcagcccaagaaaagttgacgagcacacggccagccagccctagatctttaatcagatgcttcttgtctgatggaggtatggcgtttgtatgcttggatcgggataccccgtggacagtgagaatgaagttctcactggcgaacgatggagcaagacaccctcgtgcgaattcatacaacgactgccctgtgtccgaggtcccaaatttggcgaccacttgactctgatctgggaaacggagcttcacatcgacctcgtgaattgctgctcgtcttgccgcttctgcctctgccttggcagcgatctcggcgtccgttggcaagcgttttgggcgagaggactcgttgagtaaccgctggtgcagttttgcgtgctcgatagagggtatgtaatcactctcattgtggtctaattttgccgaggaaggagtgtcttctgagggaggagagaagacagtaattgctcgaccagaatcggccgtggaagtggccggttcggaggtagatgggggaggggcgacttcgtctgatgcgacggtgacactggagggctcgggttgcgatgaactggagagctctcgaacaggctcattgcttgtactgtcagcgggagctgctgtgggcgctgtgttcttatcctgtgccggaggagcctcatcctctgatgacttgaagaactcgccaatcttcaccatggcttcttcgataggctcttcggtccgtcggaaactgagccgtataagaacattcccactattgaaacctagctgggctagggttttttgtagatctgtgaagctcgatacttcacgttccaaaatctgaaggacggggatctcatagtacagtcgtccggcgacatctccactatcggcagagggcgctgcccgtgaagtgaggttccgtactgggccactccctgcaactcccgcctcgaacttgcgtagtaccatccagagtgtagtcgtactgggaaatttatcaagtatgcggccattcggggcaccacgagcctcagattcgggcagttgcagggcgacggttacgactgacggggagcgggagatttgaacaagttcaagttttgccccagagatgagaccagacagacggtaggaaagagaaaggtctaattgcttgcgattgtgtctgttgcgtagagaagaccgggttagtgttgtcatcggagacaaggaacaccaactcactttaatgagtattgactagcattatatccaagcttcgagcatgcttcctgtaggatatcggtcaagtgtttggtgggagtagtcttgattgttgcccgcctggctgtcgcatcgattaccacaacgtgggcactcattgtgtatagaggaacactagctctggcaataaatagggaaggttgaatatctcaatcaagagattttaaacggacagatcaagataaacaagtgtgaaactcgaatgcggggagaaagacagcgcagaaagtagtcggaaggtcgcatacgaacaggcagcggtgcgggcgtcatctgagctctcgcgtacctcagagcttccccgtcatcaactcacctccatcacctcccccaacccgcccccttctcaaccactttttctcttcttttttcttgtgctttagctctggaatatcccttttatattgaattgcattgaaatcctgcaataatggtaagaaaaatgctccctttgtgcacatcgtccacgaatctctggacctcaaagctgaccgacttctcccatcacagtctaaccccttcgacatcagtatgccggaaccttgtccctcgtgaatagtcaactgaaatactaattgttttgcagatggcggtgcctgtgtcgccatggtgggcaaggactgcgtcgccatcgcctgtgaccttcgtctgggcatgcagtccctgaccatctccaacaacttccccaagatcttcaactacgccccatccacctatctcggcctgactggcctcgcaactgatgtcaacaccgtctccgatctcttccgttacaaggtcaacatgtaccggctgcgcgaggagcgcgacatcgcaccgcagaccctcgccaacctagtgagctcatcgctgtatgagaagcgcttcggtccttacttcgtcagccctgtgctggctggtatcaacccaacaacagggaagccgttcatctgtggctttgacagcattggctgtatcgatttcgccaaggacttcattgtcagcggaacagcaagtgaccagcttttcggtacttgcgagggtctgtgggagcctgatctggtatgtattattggtgtcatcgtacaacttgttgaattcgccttctaacacagtttgtcattacaggcccccgaagacctcttcgagacaatctcacaagccttgcttagcgccgtggaccgagatgctctctccggttggggtgcccaggtttacattatagagaaggacaaggttacccaacgcttattgaagggacgacaggattagatttggggaagtggttgttttgggctttccgttggtttgagggcaaatcccggcgtctacggtcttcactggatgatatgtgccgtgtacggtcatcaatgacgggatagtacaagatcaacgtgagagcggttgatacctgagctgaaggacagttttgttcttttggctccatgtttttcttactcctatcacgataataaaaggccccgttgtcatgtcacggcagtgttccaatttgcatcagaattcaacatatttaccagggaaacggaccaagtccagtcttcgagaatcagtaatcatcccgtctgttcaaaagctttgactgacctttgtctctcttcatagctgcccacctccagtagagaatcccttcgaggatataaagcgaacgagtgagaatatgaccagcacgagctgttggctacaggaaccttttgataccagacaccaacttaggcacttcctaggtcacaaaatggccactattattactccgtttcccaaactgtaggggatatagttggttgttctaattatgtccatagtcgcactccggtgttcctcggtctagaatgctgatattgtacaattttcaaggacgagagctgtatgagcttagttaatttgacgcgatgcgcacattcaaactagaaatatattcccaagagcaggctaactggacggtcaattctagcattcactacatccacgggtacatgagtgcctgacaacatgatattgcctaaataggaaccggccatgggaaataacggaaagtgcttcacattgctcatatgctatgcttggatttctcaatcattttctcaggtcccccacttcatgtcttttatgccgaacatgccttcagaaacagagcacctagagccctctatgccgagcctgcctccagaaatagagcccacaaaggcttctatatcagacctgcctctagagctcatggacgagataattcaactgctccccataaagtgtcaggtctgctttgcactcagctgcaagtctttatatgtacgctatcaaaatgttttggcacaagaggaatttgccttccctacatataactccgacgggggttggcttccatgtggggttttagctaagaattccagccgggaaacaaatttacgccgtcaacttctttgtcgacttcaaggacctagaagactttactgttgctcatgcaccaagttacacctggccaacgagtttgagtcctccgagagggaatacagcactgggataaaccgcaaatgcaagtatcccgggtttgtaaacgtctgtccctgcagtccgttggatattagagcaatggctcgaatgctggaagggtgtcaacatgaatgcatcgaatggcaccgttgctcggtcacaatcgcgcctgaagtggttgccgacgtgaggatctacatttcacaagatgagcagacatatttgcgagtccggagccaatgggagatcgcttacactaaggaatggttcgattacccaaatattgcccgttttttgggctgccctcatcgctctatcgtcccaaatccccagtctctcgtctgtggtatggccaattggacgaatgctttgcgtgcagcctttataggaagggccactggaatgagattggcaaaaaattcggaattgagataacacgaacactcgatgctcgtgagatcttaagaagtgaagtagatgctaagcattcgatgcattgctcttgagatacagtcaattaaagatatatttagaacagtcgaatccatcctttttccgcttctttccgctgtctatatacaacctaagtacctggaaaattccagaagatatttaaaaaacatctaacacgacatccaaaatacctataaaaacgctactattagttgaatggatcatatcgctctcaattaaggccacacacgcggccgacccttgtaaacatacatatagtacggctagtagatctgttctataagatcttagatgtaccgagtaccttccctatcatagataacagccggggaaatcaggtacttggtacccgatggccctctcctgatctagatcccgctgatcctgcagtgcagcctccgtgcgcctccgtgcatctccgcaggattcaagggaaaaaagacacaacacacaaagaggagatcgattgtcaaagggaaattaaagcttcagagaagcctgaaacatctctgctagaaatatcattagctaccagaatctataaagctttaatgacttcttgtttcaggccgtgtctagaccgcccctccccatcgaactaacggaaaatcccctctcccctccttctgagcgtcttctctctttaatatttcatattttagtgaatgtacgttgaagttgtctgatccatccacggtgtctattgttcatacaattgaatgctatggtccttaccaccaccctcggataaacacgagagcccgaacaacgaatcctcgaaccgacgtcactttcactgccacatggactatgcccgacatgcccgagccggatgtctctcacgctgtccaaccgtgtcccacgccattcccctcgtgcaagtcggagtgcatcaccggcgacggactaaatgccgttcatgacgatggagatgtgcaacgcgacttgggaacatggaatgatggtgtccagaccactgccattgaacaattggttgcactcaaaaagtgtctgcgggcagccgacaccgagctgttctggaaacggcttatggaggacatgacgtctataaccaaagcccagtatgggttcgttgctcggagggtgcacggaactgagcccatgccagaattaggcgggcggcgcccgtcggtttttggtgcagctttctactacaatgatggttatcagaaagttgggttgcagcgaaacaattatttcgcgggagggaaccccctattgcacatggaccacgaacggcgttgtttggtccccgagaacctcagctcgctcttatcgttcggcgatgatcaattgccgttcgccgccgatggttatttggcgattcccctcttttcggctggaaagtgcctggcgcacctcgggttgatgtggtcgaaagaaggtctccggcatagaaatctgtcctggtccttcctggagatgattctccactcgctcgaagacctgattatacaacggctggacacaggggaacaaattctagatgaactgttagattccccaacgaaaaatacctccgagttccacaacccccagactgccaccttccatgaagccgctgatttcaactcccatgatttcaactcccatgatttcaactcccatgatttcaactcccaccccctcaaaccctacgcccgaagcttatcccatgagctgaggaccccaatgcagggtgtggtaggcatgcttgatgtcatgcatgctacagtacgcgaggcgatggaggtccaacctcctatcaaatcgggagacatttttcaatcgctcaaggagggaattgaaatggttcaagatagtgcgagacgtgcggttgaagcggctgacaatgtcgttcatgcttacgagctcaacatgcaaattcccaaaaccccactccgggaggagcccgacatactaggcggtctcacagtcccacctgctatacccgagactcggccgagcatcttcatcgaagggaataacatcgctgtaaacccgtacaaacggcggcggagcctaccatcggagctgaacacccgaccagtgcgcaagcaaagactgcgtgcagtttcgtcccggcaagagctttcgccccgcagcgaagaagtcaagaatgctgttcacgaaagcgaccagatcgtacatgctaccccagctcgccagttcgaagctgtattggctaacatggccgatccacgcccgtctctcgcagtccgacgatccgcccctcacctactccttgagggaatcaatgtgaacttaagacgttctgctttgcgatttaccaaattacgagatcttctccgcttggtaatcaacgagtctcttcacgttggtggccgaccggactctgctgttagcaatgcaaccgagtttggcgaacggattgagattcggtcgcggtcctcaaacggtgaattgttcaccaaggttgtggactggtctgtagacccttcattaccggacacccttcttgccgatgaccgtgatttggccaaactaatctcgtgcgtctttctcaacgcgattaaatttaccaacaacggcaccattactgtttgcgcgactattgaccccaagaagaatgatgttcatattcttgtccgcgataccggcccgggaatccccgctgcattcctacccaatctcttcaagccattcgctcggggagatgcatcgaccacaagaagcaaagatggcctgggtctcggtctcctcgtggccaagggcctttcacgcaaaatgggcggtgacttgacctgtgtgcgttcgtcgacttccggtcctatgcgtggtacagaatttcgaattcgaatccccgtcaaccaacgtgaagctgagctccgccctgaaactcccggtgagagtgtttcgacgccatccacctctaccaccgacaaaacacgacagggcagtgccagtagttctctgtctgatacctctccctttaactccccatttatcctactccagaatcgtcagcaacagccgacaccaggcaccatcgacgaaaacatgtctcaaagcccaacactcctgcgaccgtcatcacaaacccttttgaatcgaacacatatttccggcgatgcatatgacaagaagcttggcgagaaatatccgctgcgctttctcgttgctgaagataatcgaattaaccggcgcgtactggtgagcatgctacgcaaacttggctactgcgatgtacttgaagcggccgatggcaaagaagcagtccagatcgtccaaggcattctctccgcgccaaagccccctgtcctagacattgatctcgatccagtaaacgcaatgcaaggcgtcatcaatgagcctcatcagactacaaaaaccagaccgatcgatgtgattttgatggatctttggatgcctgaaatggacggatatgaagccacctcacgaatcctgcagatggtcgagaaccatcgggaccaacatgctgcttttgagcgaccggaccccaagaaccctgattccatggaaatggatccaattcccaactccttatgtacaccaccccctcccacagttcttgctgtgagtgccgatgttagtgacgaggcattgaatcgcgcctccagagtgggaatgaaaggctatatgacgaaaccatataaactctctgacctccaacggctgattctcgaattctgcggcggtactggcaacggcgttgtctaaatcctagtataaccactaggccgcccatccgaacatgatgttgcttccttgcatttccatgcccagacattatacccattgatgcggatatttttcttttcatgtacagaccccacccccaattgctttgttctttagcccaggcgcctctcacgttagggtatgcattgactcggcgacctattcattttcaactgccatataccatccttgtcattttttggccccttttcagctaggggaaataccatgatctagttaatagacgtgtgcgaactagccagccctggagtcgactggtttttgttagggacataagcatgtgatcacatcacgcttgatcataacttctcttcttttcctcttcttctccccattgctagtttcctcgttgaatgaaatctttcttttgaccagaacgtctgcaacaatttgatccaaagccttcaacatttacttaccaaggcttattcagcacgctttttattaagcatctatggatgctcacaaggtatataaaacaagctaacatagtcgtcttatccagaacaatataagtaaccgcattgtttgcatctcggttcgccctggcaacgaccaggaacccttaggtccatactgcaccaatctgctatccggagagaagacctgtgtcagttctccgggcgatcttcagaacttaaccaccattgtggccgctatccatacgggcatcaaaccagaaccatggcttatgattcctcaccctcgtcatgatgcaccccaccgattactcgaacaccagatatcattctcatgacgaaacttcaccgccagtgcatgcaaatccaccatctgcaacgtgacaatcggataaaactcttgcaagatagactccactgcacattaatatactccttaaatccagccccggccacatccttatcacctagacctagcatctatggaagacgcgggccgcttgctccctgggacaccgaaacaacaaagggaatcttttggcgctcgcgacgcggcgcggaagaaggcagtggagggacaatacagactccatggaagccagtgtcacctcaccataagacaagcggaagtgtgttttgtttcctctgaatttgcggcctccactcgggcctagtggcggcgactcatttcctgcatgatttcgtggaaactatcttcgccgtgagtggctttgagaccatcgaagagattggtacgttgggtatctgagaaggtcatgaagtcgtcctcgctggcgttgaggagctggtcttgggtctagcctgggggtagaaggacacaattcgctcttagtgaggtggaatgaggtatattcattctgacaacagcggtcggatgtgggatttttagcgtttatgaatatattcactactacgtttagaaagacgtgtgctccaaggcaataattttcatttctctagatcaagtcgatatcaaccctaatgctttcttcttgcattttctggggagccagcatatgtcatgagttgaaaagacttctggaatataggcctatacatccgtcttttatatgaacctattgtcatattgacataggcagctctactcgcaaagtgtgaaatcgtccaatcctgaatcaggaacagccacgtgagggaggcagaggtcgacattctctcctttaaggtgcttgaagacccgagagtactcggtctatgaagaaattagcaacttccctttccacatggtcctttagggcatccgggagcacaaacctcaatgatgtccacaaactcatcatatacgtgatccgccttcatcttctgacgaacgagatcggtcactccgcccaaaattgcgactaccgtagtgaccttgctgtcccaagtgagaagtgcggaaacccccgttccatcaacacgagtggattcagtgctgccatagatatctggagagttatttcgattagcatcataccaatcaaaccgtcttgatatctaaaaggtgtcactgactctgcattttcttggcaataaccatgttcctccaccaggcgagtccgacagacttgtcaaccaaaattgtcgggaatacactgtacggcgtaatgacgtctagctcctggacagtttggtttgatatggaggggataccagcgtttgagatatagccggttacgtcgccgatggagggatcggtgatgttgttaactgaggcgaacatgccgggcaacttcgtggcgactgagttgcaggtccggactcgctcagcgttcttaaataggcgactaaatgggaaatcgttagtacatgaaagcctatctctgtcttatgcttgaagtctcaccggacaatatcgatgtcatagtagggcatctccatcactttccaggtttcgtggctggagaaccagaatcctgtcttagaattagccactgtcttctcgtctttcctttcatatccacaaacctttttggacagtgataggcccgaaaccgcccattttgtagtccacgctcaccagctggggccttttgatttcccatagcgcctgcttatcggcctttgacagaccaccgaagaattgtagccagaatgtgaaaatctcgccttcgaaagggtcgtccagtaaatctttagtctcgcatagatacgactgatccgggtgattgacagggagggattggtctttaatgtcaataacggtacagacccggccattgcctttgtaaaagatctgattaacagacaggagattagcgactaatccaaatctaacggggaatcatgagttacataccttagcagcagtagttttagtgtagtccatccaaacctgccatttctgtgcgagttcccgatagcttttattgcctgtattctcaagagcctggatgaaaccatatacagcccatataagttcactatacagatacttattgttagcctagaaaccagaacgagggaaaagaatatacatacccattatctagagaaggcacgcggttgacccaggctgtcactggagttagatcttgagcatccgctgtgacccagggcaagaagccaccgaatcctgggtaagtctcattgaatttgagatacgcctgcaactttttctgcataatagaagccgcgattttaggagcctctgctgtattctcaggcgagaggaaccgagcagcctccggagagccagcaacagcttgggcgtacagcatgatttgaagggactattggaatatgagttgagggctttcaaacagtaggaacatgagcacaaacctctttgctggcagcactgaacgtgtgcttggttgttgcctcgccggtcacccaatcgatgttagtgccatcgtaggagataccattgttgctattatatgagatgttgttctgatgaaacttgccctcccaatacagcatatcattgatgaaggcagtaggatctcgaaggacttgcttttgggaatattgatgcgcaaaacgacatgacggctccttggtatgtccggatatcgatggtagagcattgaccaatgttgtccatgttagaacatggccgaatttctcgtggagacgcatgtcaggagctcaaagtaaagagttgaataccgaattagaatgactagccatcgaaacggacatctcgactcatataaatactgtatgcttctgacttgaggcggaaatcgagtatttgccgaatttccatgtccacgaattatatcacatcacgagtctctggggtccccgcattccaagaagcttttcccctgagaaagccttgaatctgataatgggctgagggtgcacgccaccatggtagacgttttcccgtttgtttagctcgtgactatgcgaatctatttccgctataggatgagatcttcaaccgggattcttattggaggtcaattggccgaaggagacggagaatcggggaattatagattgtgtggggaatcgcagaatcttccccagacgccgatcatttactcgattcagacaataggtaggtacggagtaagcgaagtatgtttttatattttgtaattgtaccattaaatctagttagttaatatacattcatttgactcataaaactagctttcataacaaccgtcgtaaagtgtccgacgctttcgagtctaagcgggtcagtatatcaagaagcaccgatagatcgttacgggctcgagccgacagaggggacgcttcatgctgatcgataatctcgagcagacaagctcctatgagcctgatcttttctacctatatggccatcagaacttgctcatttgacaccaggacagcaaaagaaaggcgacttacacatggttcgccattgatctgcaatgcccagaaaggagcatcgcgaatgactcggagaagatcgcgtgcaatgtcagtcttccgtagtagtagcatttcatttggcgcagaaggatagtaattgaactcttcaaatttctgtgtgattaccatctttagacagtgcaacgagacgtaaacgttggctgcttgaatgatatgtagccttgtgagcctagacaggcgttgattgtctttattggcgtttgacatgagctggtcatattgtaaaaaggggggtaagtcatcgagagacgtcacaaacagcacgtaaagatggtcaagtctgtgactttcttctgccgtgggaggttgacgagggagtaaattcccatttttatgactatccaacaatcgcatctctaaaagcaaatcggatgcactttgccaaagccgaatgtttgcattgaatcctgcaatgaaactattttgagtactctcggcatctggaacaccactaccaggtgtcaggattgtttcatcttcaatgccggtcggatagccgatggtgatgccagagttgaatgagtatttgtgtattgtgatcggacggttgttcagaatggctgccgatttatcgccgatataggcaatccagaacgcccgtcgccgaaactccacttcgagagaagtgagcccctgcagtgaatcttcttcgtgcatctgcatcacttgggctaatcgggtggcttccccaaagatgtgccacgacagtcgtggctttccggcagcatgcatgcagttggagtggaagtatcgaatggcaacggagttggcatttgggtattcaagatcggcttccaaatatgtggccaggcaatttctggaggcttggagaaatatgtctgcgatcctttctccctcaggaaatatatccttcggaaggagaaaagccgtttccgcgcagacagcagtgatcaaagtgaaagaaagatcgggccacagctctggatatttgagactattcactccatatatgaggccatcagctctcgaattccttccttgggtcacgaagaaccctaacccatctcgtagactgggttcatgaacaagtggagtcaagggatatagatattcaaagaataactcgaagcaatgattgatagtccgctctaagttcgctgatgtgctctgcacgacaatcacccgttccaaagcatgccatcgctgcaacgccgaggtaattcttgtagaggcgacatcggaaatagacgattgggctgtatgcacagtatcaggggaaagagccggatcaagtatcgggatattggcgtcccatacatctagcggaactgcaaccggggcggtcgaaccgagattttgagttatagagtcatcttccgatacctgcaacgctggtgccaggggactatgcggaacatttggataagccacatcatgcgacctttgtcgcttggatttaggcccacgtctggcgatcggcacgtcaaatgtgcattgcatccgagccaagcggcagttggtgcatattgacgattcacccgagcagtcacactattacaggttagtttagactaggtaaggcgggggtttgcttcatacctttgcttttctccgacggcaacgatcgcatgctctagttgacgagcgcgaacgagatacagggctggccatcatatttttcgtctcggcaaaattcgtcggaggttagggcagttgggaaaatgggaatcgggatgagcctcggtcaaatactccgcgaatttctccgaatgccccaggtttttcttttcttggggtatttccgcgccttgattaattaattaattaattaatatacattgattaacaggggttgaaggtgctttatattagctttgtagaattttaggtcaattgcgtaatatctaacaaaaaaaaaaatctcatctatagtatacccgtctcattgctctatttggattcggaagcgttgccacccatgcgtttatcaaacattcctttcagcaacaatgcggattgcttcggcgtcctttccagggtgttgtaatcagtgaaggtaacgccgaagcgaaccccgtatccatcggaccattctggaagaaaaattagctcaaaggtcttgaagtatgaaacaagacacgtacctaggttgtccatcaatgaccatgcgaaatatcctttgatatcagagccatcttctgtgcgtgctgttccgaccgcatcgagatgatcttcgaagtatttgattcggtaggtatcgttgacggcctcttcagctgtcatcttgtcttcaccaggacacgggcacccgttttctgtgatatagataggcttgccatatgcacgatatactcgtgttaagtgcttccgaaaaaggctcggggttgacaggagccaatgcacaccacttttctctccgatcaatacaccttgcttgttttcttgtagttcatccacatttcccaagaaatcagtctcagaggcaggctggtcgcgatgccgggcaaattgggaggtgtaatagttcattccgtagaagtctatgtcggcctccctaagcagagaaaagtccgactctgtgaacctaggaagtctctcgccgagttgctctctcatgcattcggggtagtcttgtgctaaactgtcaaaggtgttagttgtgtgcttttgctatctgaaactccgaaaaacctaccaaacggggttcgcaaaccatccgatatggaactgcatccggcgttcagcagcttggtggtcgcgctcatcctcactatcccagggctcgtagtaatcgccattcaaggagattccaatctgcccttgctgagaagctcggaattcccggttatacaaaacgacagcgcgagcgtggctcatgatcaaggctttccccacaatccatggctccgtagtagtatcgccctccgtgcactgcggatttatactgctacgcccgggcgcatttccgccagtagcgtatccctagacacgtgttagatgctatccgaaaggataaaaaagaaaggacaagggactggagaaacatacgaaaatagaagcaatccacggctcattcagtgtgatccagttcttgactcggtccccaaatctctcatagcaaatctgcgcataccgctcaaagtcaagctgtgactcctccacattcaaccaacctccgtatcgatcatgaatgccttgaggaagatcccaatgatagagagtgacccatggtgtgattcccctggcaagcaacgaatcaatgagtttgttatagaacgcgatgcctgcttcgttgactgggtcgtttcttcctcctagcggaatgattcgcgaccaggaaattgagaatcggtatgcttttgcgccgtatctcgagagaagatcgaaatcctcctcaaatcggtggtagtggtcgcaagcgatgtcgccattgtctcccttggtccttgttggctcaaggtggcagaaagtatcccagatcgattttccacgtccgtcttcattcacagctccttcgatctgatacgaggctgttgcaaatccccattcgaaatcggggggcaagggtactgacatactggcaaatggcgaacacaaagccacagaagcagtgtgaagtactttgaaaaagaagaaggtgacagagctctacccaagcagaaaattaaagctatattccttatagccggggaattgtggcgttgaagtggagagctcccattgaaggataaacggcaaaattggcatttcgccgattccccgaatctccagacttcacatttttctccacggggtaattccccgcagaaatgcggaatccacgtttctttcagcacgtgaacacctccagggttgtcggaatgcgtagagttcgttgtatccacccggctgtctcttctataagaagtgcaaagaagccttcgggctaagactccctatcattcgatcataggcaagtccacttcatttgtgtcttagtctcaattgaagtctgcaatcatggctcctactgccgctcatgccacagagaacattatctcgtccattgacgtggattctatgccgcctttctggcgacggaagaatggtattctgctatacttcctgctcacttcgtctctactagcaagtgcggctctcggcattgatggggtgagttgtagtgtttcaagactggagtgcgtttcactgacgatctatcacagtccatgacaaacggcatgcaagtcttggattcctggcaagatcgatttggacacccagaaggtgctacattgggtttctttggagcctcgaacgccattggtggtgtcatcccatttatctttctcagctggattagtgataaattcggtcgtcgcctacccactgcgctagggtctgttgtcatcattgttggtgtgcttgtcgaattctttgccacttctttgaacatgtacattggcggcaagatcgttctaggtgtgggatcttcgctcatccagatgggcgcacctgttttgatcacagagctgtcccaccccaaggaacgtgtacaagtcactactttctacaatacatccatcgttcttggctatgtgattggagcctgggcaacgtatggttgttacaggatcaccagtcagtggtcatggcggctccctactttgatccaagttgctccctcggcctaccaattctgcctcatttggttctgccccgagtctccccgttggttgattgcaaagggtcgtttcgaagaagcccgtaagatcttaatcaagttccatggtgaatgtgaccccaactcggagctggtcgcggtggaatgcgccgaaattcagcaggccatcgacaaagaagcagagaacaacatgagctggaaggacttcttctcctctcgcgccaacctcaagcgcctgttcctctgcttcgccacagccgttttcagtcagagctcaggcaacctgctcgtctcgaattacttgacccagatcttgaaagacacgggcctgaagacccagtccgaaattacacttgtgaacggaatggttactctctggcagtatttcgtcgcgatcttcgttgcactggtcatcgataaattccgccgtcgattcttctttcttaccggttccggtggtgttgttgtcactttcgtcgtgtggacaatcgctgcccagcaatatcttgagcacaactctatagtggccggtcgtgtcgtgattgcctgtatcttcttcttccaggcattctacactttcgcgtggaccaatctgattgtcacttattcgctggaagttgtgacacttcagatgcgcgctaaaacatgggcatttgtgctcctgactattcaggtggcctcgatcttcggaagctatgtcaaccctatcggcctcaagaaccttggctggaagttttacatctactactgtgtctgggtgcttgttgtcttcctcgtggtctacttcttcttcgttgagacggccggtcctacgctcgaagaactcgcttatctgtttgagggcgaggatgtcaaacgtggaattgttgacaaggtcgcggtgcaaaaggaacaagtacaatatgaagagcacgtggagaccaagtcggcgtgagataccattgatatgaatgaaccatgacatgacgatcatgcacataacaaatgaagataaaaataattacaaatcaatgatttccatcagaaattcgaagactatgttgaataaacatcaaaagagtagtcgaccgtgtatgaggcctctattcttgatgacgtgagctgtaggaataatactattagaggtacagagtagccctagagacatgcaatatgtccacaggttgaggtcgttggtatgggcaatgtcgtttcctggaagatctacgcaagacaagggaatagaagaaaagatatcattacatccattatcaagatcgacatcttaccacgctccaagcactccgcaccctttttttgctgaaacactggctttgtggcccaacgagttcacaaaggggtctcgagaattcgaaaggccttcgactagaatttaaagatctgccgttcgctaggaaaacagtataacaacacatgtaagcaccaatcatcaatattcacgtaaaccgacgtgcgtgaccacagcagaggtggaaggaagatgcaaggcataagaaacgaggtatgctgtagggaataagacaacgcggcatctaagtcaacttctgcttgatgaagaatgaccgcaggtgtgaaagctgccaggcacatgcggcggacaaaacggcgagctggataagagtccagcgcacgacacgcgagttggtggtctcagactggtcacgaaattcagactcacgttcctaggtagaaaaaacattagtatcaccactccaatcacctagagagactctggccatagattggattgggaaatccttacccgctggtacacctgctcacgacggatatcgtgcaatcggctgttcatatccttgacccgctgcacgatatccttgattttgtccttatcctcaggctcaatcttgctggtctcaccaatggcaaggtcgacggtgatcttgacggcgcccaaagagttggacaaccagccggaggaggcgtccgtttcaggtgtgaagcagattctgtgctggccgggatccgcggcggagaagtggaagcgaccagaatggctatcccgcttggatacgacgcggtggtcattgtcgaaggtctcctcgacagtgatgtgcatcttcaagttatggtcgaccgcgtagatgccgctctgggggttcaggacttcagtttcgaaacggcctatttgtgatttaacaacataggttagtttcaaattccttcgtaaagtctctagagatgcgcataccggctactagagtatccttaggcaggtcctcgaagaagcactttgtttgccggccttccatgtagaagtagagggcattagtcggcagaagaagagaaaagaacgataggagagccaaagctgacgccagccatgacgaggatgtcccagagaaaaccatgatgaggagatgggcaattggatagtcgcacggccaagtactcctctccgtgaaggtgtcaacatgggacgtggctcctcaccgcctgccgtctccggaatatctccctttccagcgggaagcctctgtcgatgtgatcttcaatttcgacattcactagtctttattgcatcaaacaaaatctactttcatcttctcgtggtcgcttattaaaatctaatcgctaaatatcgaagaatcactccttggtgtcgtgtctagatcaccacacccaccgccaatatggccgcggccgatgttcgcgacatgctggatttgcccgcagaagggcagcccagaccgcacaagaagcagaaggttgtcgaaaagcgaccaggtaggtgtattgcgctccccgaaaaataagatagattactgacaggctgttgttgaagagggtattacccgtgaattgtacgcgctactgggcgaaagggcgccgccaatcgccattaatgagaacaagtacaagggtcgtccaaaatggatgaacaagttgcgcgttcgaccatggcatgttgaagatggggctctttgtatatccgaatgcacgctgacattgaatcccatataggagcatggccccattcacgaacaatgcccgttccgacggcctggttttgaaccactggcagcgaaaacacgagtcagcccgaccacctgttcccacacctgcacccgcaccctcagagtcccaaatggaagtggatcagcccaaagaagaagagaaagaggacgtaccgaaactgccggaacaagaatatgcctttgctaagtataacgtcaaaccgcgattgccccgtcggtacacagatgacgagtacaatcgacatcttacaagtgatgactggtcgcgcgaggaaacggactatctggtggacctcgtcactgattacgacattcgatgggtgctgatcgcagatcgttatgactaccaaccacgaatggactcacagccggatgcgaatgcccttgtgcccgcaaagcaccaccggacaatggagcagatgaaagcgcgttactattacatcgctgcaacaatgctttcacttgaacatccaccctcagagatgtccgaggccgagttcgaactacacgaaaagatgctcaagtttgaccccgaccgagagcgtgaccgcaaagaactagcggcccttcagcttaaccgcacagccgacgaggtccgcgaggaggcaatgctactcgaagaattgaagcgcatcacaagcaacgagcagaacttcatcaccgaacgccgggaactctactctcgcctcgaggttcccatcagcgtcggcaataccacaatgtaccaatccagcgcgggtctttcccagctcctacagactctactccaagccgacaagagcaagaaacgccgctccatcctcggcgacggtgccatccaaagccccgctggccagactccaaccactgcgggtggcatgggccgagccgatacccccgtcacacaggccgcaaacaagaagggttccatcacatcaagggagaccaatcaaatggtacgcacgcttaccccagcagaggaagcgaggtacggcgtccagcaccatgaacgtgtctcggcaggcgtgcaattccgcagcgaccgcgcacagcgactcacgcaagccaagtccaacgtgcaaacccagaaactggccaatgctctatccgagctcgagattccggtccgcctgtttatgcccaccgaacgcgtatgcaaggatttcgagaaactcattcagtctgtcaacatgctcctcgacgctcgcaaggtgtccgaaaaggtcgaaagtgagatccgtgtactcgaagcctcgaagatggagcgcgaacgcaaattacgagaagctgctggtatctcggggccaagtgctgactccgggcatccccatgtgaaaaaggagaatgaagacggcgacaccggcgttttgggtcactctgctgcccaaggtgctcaacaagggggtggtaatcacaagcggtctgctagtgtgctcagtgccgtaagcgacaagagcaacaagcggcagcggagatagatcatttgcttccctactggtgataaaattacacccttattctgagcgtgtgagaactgtaagatgtattagggatcaattacccatattctgtacgattaatgacacccaatttgggaaacatactcataattgacccaaactccatccgcacgagtaacaataacagcagaactcactcagagtccttgataacagtatttttatgcttatccaaccataacactctcgttactcctgtgatgatcgttgccatgcatcttggtcactctgcctccaccactagacttgttcggctcgcccaccggcttccatagaaagccccgggcatcccaatgcactcctgatacgcactcgcgagctcctctgccatatcgcttctggtagagtttgcccgtcccaggccactcgatggatggtcctggtactgcactggcgatttatcggataattcttttggagggagattcgagcgtctcttgctttccctgttcctggaaaacttcagtacccaacggccactacgggagcgggaaggttctccatttaatctgtctgcactcctgtcattcgacggatcgaagtacacagagggctggtggtttgtttgatccatcgagaagtggcgttcactaagtggtgaagcatctggggaccggacacagacatcacttccatgggttgaattgtcgtacttctctggttgtggttgttggcgtgtggaccggctgattttcgcccatcgacttaaaaaggtttcgtccacgtcttcgacataaaagctgcttccggaatttggagtctttgcagaagttggtgtcttctcagaagttggcgactcaatgtgttgcgcgcgaatcgagtttacacggccaacagccattccttcactagccaagtccactgccagcggtgcgtgtctattacctcgaaccgaatggctcttcattttggcccacatcgatggtgtcaaaactggttctgccttgacattagtaggactttgtttcacaggagactgttggctgtcaggcctcagcccgggagtgtctctgtggtcctcagcattgtccaccaagctatacccatagcccatccgccggccctcggtcatccagccgggactaactttgcgatgtggtccggcgccgttggcgccattggaaatgccatgactctggggtgatccccagtttggcgtatcaagttgctcaacaaacttgcttttcagagcctcggtacctggttccagttcatcttcgaccgagcaaatctcagctgccatttgtgtatgaatattgggcaagctatcaattgcatttgcagcatgaactcttagtgattgaacggcagatgctccccgcgaagggtcactgctttggcgcgaataaaaagaggacgcatctcgttgatgagacatagcctggttgtgggactcgggacccatgattgccgttccagacctctcatgaggctgaaagttctcctgtgataccatttgtagcccatatcgattcgcacgtggaagttccgacatggatgcattagtcgatggcggctcggaccctatgcttgttcccgcgagtctgtgcgaaaggtctagatcacccagatgtggtactcgggcctcggggtgtgtcctgggagaactagttggttgtcgtgttttgcgaaccataatgcccggatcttccctggctagcgatgcggaagatgccgcgcgataatcattagggtttgatcccatgtaatgagcccagtcagccacaagattctgaaggttctcaccgctgctgctgcccataaagccttctcgagatcggagacgagccaattcttcttgactggcatgaaggcttggaagagattttgtgaatgtgctttgctcccccgatcgctcattcttgaatgaaggcacggactggctccctgtgtgttcggttgcagaggtggggtgagctgagcgccctcgcaaagtttctgggggcgtgggtatataatgcatgccaaagggagttcccggggtatcggattgatcatggcctttggcacccgtccacatctccaagtcatttcgctcacgactgcgctcgattaggtcctgcaaccccattctgcgatatgccgggcttctgggcgacgctctcatatggggggcatgccgaggactcccaatgcactgggcatcactgtcgtaccctcgcgcgctcatcagactgcttcccatgtcgctgaccattgaaagccctgtagtccctttaggtccatttggctttggcttgagcgagaagggaaagatgggacggttttctccagactgtctggattctctcgagaatcgatgacggagacgcgaaagacttgtggatctccgcctatgactttgcatagaccttgcagttgatcctagtgcaggggctgtggtctctcaagttagccaaatataatatgagatcaagtaatgggctgagccttgcctggggctcgctccctgggaccatccacattctccatttgaccatcttggtatgattgtgcgaagccaatcggagaatcaacacgatgtccccttcggagacgaggacaagcaaggaaaaacatttggacatgggatgtttacaagatgaacttctacgcgctcataaatctctccttgttagctttttggggaaggcactatcgtcagcagatgagccttccattttaagacatcacggggtcgcacttgctgtttgttgatgtcttgggtccatggctcagtctaactcaatgtggttttggctcacaaccttgcgtataaaacccatgttgacatctagtacttacatgatcttctcttcgttcaccatatggagtggatattgttgttattcattacgtactagtgccagaagtgggaccgtacccataagcttgtttttagttttaatatgggcaacagtaggactgtggaatatgtatgtcctcaatgaagatgaagaatgtataaaatctcttctttctcttattctcactggttagcgggcctatcccgtaaaaacagtttcactttctattccaccgaactgtcgaactcggtgattttgccatggacctcgtaagatcaaaaagcctctgctgaggatggaaataatcaccgaacaatagttgcttataccaacagtggaacgtggggagctgctggcactgaattgtgtactttgtaccaaaagtaagggagtttggccatatagtgcatggcccaatcaatgcaatctgctaaccgcccaataacaccgtagatcatttttgcaatagattaatagggacatgaacctccaatccgcctagttatgtatccatcgactcgctgaatcacatagtggggttgtgtaaatcagggaaaatcccgcgggctcagccgcaagacgacaattcgatttctttggactttcccggtttctttctttgatcggatgtcatatatcccacatgttaccccacctcgtgtcacctttgaggctctttatcatttcgatgtcaaccaacttgaagaactcgcgctccttgcgcttaatcgtcgcccttgcaattccctttacactcatttgttatctctactcgtggagacaatcacccatattcatctcccgtcccgccataccgcagtcttccgagacaactagaacctgcacagcaatatcagtgcctctaaaggaaccttcaaacaacaataatcttactactcccgctgcacgcatttatacactgccagacaaggtctggcattctgccaagtttgatgatatatcagaaacccaacgcggatggaccggcagctggaccaggaaaaatccctctatccgccaagaattgttgaccgatcgatccgccgaagcattcgtgcgcgctcattattttgaaacacgaccggatatcgtggaggtttatgaagcccttccaatcccgattctacgtgcggatctttttcgttacttggttgttctcgccgaaggcggcatttggggcgatttagacacctcctgcgagaaagaggttgccgagtgggtacccgtagaataccgaaatgagaatatcgatatgattgtcggattggagttcgactttgaatggcgaggaccggggacggaagttgcttcccagttctgcaattgggtatttgtcggacagaagaactcgcgcaatctgaaagtaattgttgacactgtcatcaataaattggagggcattgctcaagaaaacgccgtgagaatcgaagggattaccttcgaaatgctttcagacgtggtcgacgtgacgggacctaagattatgacgattgcgatcctggagagcctcggacaattgctcggtaggaccgtcgacgatcgcgattatgcacaaatcaagcagcccaagctggttggtgatgttttgatcatgcccggagtctctttcgctgctcttcaaaacgggaacccgacggatcaaggtgacgctctcgtgacgcatcattacgaaggctcgtggaagaaggaagatgcagatgcaaaggagaggaaaaagcagaagcaaggaaaagaacggtagcaagaagggtcatcgtcaccaccactgcctgctacagcctgattagaattatgataataagcgaagagcagcgggttgctttgattttgctttccttgtgtgttgttataactttttcattccccgggatgtaatttttcgctcgaatcctcaagagagagacaggattggagattcaaaggaacatactatgtaattaccatgtggagtatggtctattttcggtttatgctatttaaaatagtatatcaatcaaatgtcgtgttttcccgttctttaatccccgatcaacggaaattcaaacagggacaagattcggggtttgagctgcctattccaacccaaaaagaaatagaagcgcctgtgcacgaactaagtacataatgaaagcgaataacacgagaaacctatcagagtatcaagagaaacaggtgcaaatttactgccaatggtaagagacaaattgaattaaggtactccgtacaaaagaagcaaaatcccgacgacgtagcacgtgatgaagctctaccctagctggattgataaaaatagcttgccaagtcggatcttgccgatctcgggagcagatcactttgctgactggtggagctgtatgtatacattactccacttgagaatcgccaaagcttgactctgccaagagaatatcgagacaaacgcaagaaacgcaacgcatctacctgggtataaaccagactagccttgaaacgttgtccactgcaagtacccaaaggagacactccgggcgctacgaaagcagattaaggtacccgggtcttattatatggttgtacacgagggttcaatacggagtacagtatggacaaagtcaacgagaggattgattccacaattttcaaagcagccgtgccgcgatatgagatcttacgctaaggtgaagggatacaggaagtccttagccaaaggctacgcaactaccgacctaccagattttcgcaacgagttgtctgactatctcaactgtgaagatcagtctactatcgaattatgtggctacagcatgtacgagtggcgtagagacagcacgttcgaggtctttgtctctgttgacggagaatctgtcagcactcagtcagacttcagctattactaaggcaattcagactgcgaccccaagcgggatcaacagtgacggttacacccccacaaactccatgcctgtcctgccgtcgataacatatggttggcaaattccagtcccttaccaccttatccgaacaaagaactgtattcttgcatggtggacagtctttcgtgtatagttagtcaatattgcacgcagatcaatacgtagacttatttaggacagtatgagggagcgataagagcgcctgcgatggaatttccaagaatgcaaccacggggcagtacggtgcctactgtgtctgcgccaacaaggaacaaatatcttatgtattcgaacgctactataaaggctagaagaaggatcagtcggcgtgctatttcaagggagcggcgtcaatctagtcttgtagggatccttccggaagttgcagggcacttctcagccaagccgatctagctggaccaaatcaggtcgcaggtccagagggacgggtgccagtacgatgcggccagttactatgttactctgtttttgggtgaccatccacctcttctgttcggtcatggccactagccacatctatagattagccaggtaccgccgtcgttagttgacgatcgcactattgatggagttatctattgacagcagatattaccagagccccattcgtgtgcaagtccaataattgaaacattattggatccaaatcactccagatagctaggtgcagaagtagtggttattttctgagagcatagagtgacagccgcgataatcaacattgtcggacaatccggtgacctgattagtaatcaggtgtccccgccccacgtggggcctaagaccgttacaattttttttacaaaaaattacagatcttcctcacgcccacatcccatcgcactcccctctttgaactatttattccgtttcagacgtcaagtcaaataccgcaaaaatgggcaacgtaaggaggaatccccaagccatacagacgacgccagaccatctgagctctttgtttgggcttatcaacgcagtgaactaacaatactcgatagggagccaaggcaagcatgaagcgcgagcgcaacgcgaaggaccagaagaccgccaagtcgcagaccaagagcgtacgtcaagttatctccaacccccatattgtctctccggccgctgacccacatcattgtctagaacgagaaagccatgaacatccagtgccaggtctgcagacagactttcctccagaccaccaaggctcctgcgtatgtgattccaaaccccagtcctttgcgaatgccttccggtcttgcccgtgtatatggttccttgctaacatgcgtattcgcgcggctatagcctcctcgagcacgcctccaacaagcacagcaagggtctccccgattgcttccccggtatcagcgcataggaaatcaccccggtggaaccgaaccaatcttctttacgatatcacgggttagcatggctttaggagttttgatgggaagcgaacatatctagcaactggagttgagagtggacactctacgtaggcaactatgtaggtgtaggtggtgagatcataatggggtgtacatgcggtggtgatgtgaaaacccttatgattatagatgcagtcgacgatacatgatctttctctccctccatgctcactaattttcctacagtactaacagatggtggtgaaacttacacttacggggattagatatagtcgtaggcctgcttggcgaagaaaggtcgtagggtgatatcgttttggtatactatactacacattctacaatgaatttatattgattgaaattatcaattatcaaaggtctaaactgacaagtatctaccagacccagacccaacacaggattatgattagattgtgatatcaacttagcaacattattgagaactctacgagtatcgtactatcaagccatattcacatgaaacataccaagtgacatggtgcactgatgatggtgtgtgcctctctcagatcactctcagatcagctctaccatggaccttgccatttcgagtttctcagttggaacaatttccatttcgaccagcttgctgatgatacgtacagcccacccttggcagttctccgtgacagattgcctgttggccgctcgaggggggggctcttgctctgtttcaccaccatttcctgttctttgtcacaggggccagatgatagatgttcaaaaaggcgacggagtggacaatattaatagggtcatccgaaggtagatatgtcatcaattctgcatctcccgtgacctgatacaccatgccaggttcgttctcagtggcgacaaagagtgaccaatgcagaggttccccttcaccttgttcctcatgaaccagagagattgttttggagggtgggggagagtggaggaggtgtctgagacctcttggaattaattttttgctcgatccattcatccctaagaccaatgatgcgtatgggagagtctgaagttggatagccactcatttctaggtgacataagcatcaggggttttcgtacaatgagctaaacaatttcagtattcactaacgaacgagcgtctcttgtcgcaatggtccagggtagagatatttgaacattgtattatctaaccgtaaaaccaccatcaactctaatatccgcaccgttgatcatgccgctggaatcctaatgtaaaagtcagaaccagagatatagcccactaaggaggaaaaatacctgacaaagaaacaacacagaatcagcaacctcctctggaagcacaaacttgcccgtcggtatattctccaagaaggcctctttaacattcggctccccccaagccttcctcccaagatccgtccacgccacagtcggagacacagtgttagccgtgataccccgaccaccccactcagaggccatactgcgcgtcagacccaggagcccagctttcgaagcacaatacgcgccatgccgatgcagcgcgacatgtgccgcctgtgaggaaatgctgacaatcctgcccggtggcgggggattaggcgatgattcggcggccttggatgcggcaaaatagagtcgagcaaatgcctgagagcagagcatcggaccgaagaggttagtggtgagatgtttcagcgtttcttccggcggtgttatctccatgtcgctaagagatacgtatccagctgtattgattaggaaacttgggaatgctctattagatggagagcccgaggttgggtcgattatttgtttctgtaaggagttgaaggccacctgcacagagtctggtgaggtgatgtcgcattcataggtgtggatgttatctaggtcgccgctcgcgccgtaccgggattcgagaagctcgtcgcggcgtgcagcttcgaaaggtgcatagagaacggcgagatgggcaccttgttgtctcagcttttgccctatgcttgatccaaggccgcctgtggagaagttaggtttcgttgagtctggctttgtgtctcgtgtccctacctaggccgccaggtatgatggctaatctgcgggcaaatgccattttgtacgattatatttgaatagttgcaaaatgccaacaggaactggcacctgacacggtgtatgaacttcaaaccgggcattctccgctgaggggaagttgaacgctttcggaaatgatcgtccagtcttcacttgatgtcactttgtgttgaaaggctgaaagatacagagtagttagagaagcttttgttatttacgttgataaatacaagttaatgagggataattggactagaagctcatcgtttcggactaacaaaccgtcaggttcaagtcccactaacaaagatcatatttacttctctttcttctcccctgcatgaatatcaacatcatccaagacagcctggttctctttcgctgccgcaagtcgaatcctctttagcttcctcgtatcaacatccacccgccaagtaaaagcccaagtaataaggttcataatgatcgccatgccaacgaatcccatcgcaatcccaaaggaggtcgcatatcgtggtgcgaaccgagaattaaacagctgagagcccacagcccctccaatctggccgtagctattcgcaaatgcgattgcaaaagcagatcccgttgcgccctcggtggtctggactcgccagggccacatcattgtatacctggtttgtcttagcatgaagtattgatataatatagaatgttaccagtcggactcaccatgcagtcgagaagcctcctgctattatcgtcgcggcatatacaccaccgttgtttgggaaggcatatagcacgccataacacgccagaatgacaatcatgaatccaagcgggatagctggctgaggaatacgcccggtatctgcgaagataccgaatacgattgtcaatattactgcgaagaccgcagatgggatgtttagtagctgggtttcacccatagagctttgacatttgttagcaaataccccgagcgcttaaagctggggcaactcacgtaaatccaagattggcaatgacggtgggttggtagaatgtgagtcccgtcgtcccgatagtaaagaaggcccaacagaagaggaaaagccagattcgcttgttcttcaacgtcgtgataagttcgcgcagattaaagttagactccgccgctcgaggggaattgctcggtaggcgggcttgtgtgaaggccttttctttttcggataaccaagatgcagttgaagggactgtggagtggttagttatgtctggcactgaaggttggatgacctacaatcgggtaggaagaaataagtaaatattcccagtaagactgtgaagatcccttcggtcaaaataagccttagaagcatcattagcatatgatcaatctgtttgagaagctattgaaataccatttccatcctgatagaccaccagcaacgacaccattgaaagcaaatgcaagaacaccactgatcactgtgctaaagtttcctaggagagtcacaagaactatccttggagcaacctcatcgggtctataccaatagcacagctgcaagagcattcctggccacagaccagcctcgaatagtccgagaaagaaccggactgcatatagaccctgtctgtttgacacagcggcatgacagcagagaacgataccccaagatatctgtaattgtcagtgccaaaccaatcagaggtgtaataattcaacgtaccataatcctagcttgccaaatcgaaggtctcacaccttttagcaaaaggttggacggggcttctgcaatgatgtaagggacctccagggtattagtacaacttcaggaatgacgcttttgattcgagatctctcacataatacatagtcgtgaccagattatactggtctgaggtcattttcaattcagtcaggatgttatgtggtgtgcctttatccataatccgggcgtatgagacctaaaacattctggtcagtgatctcccaccaccgtactccgtagatgatcttacgttggtaaaatccacacttttcaacatatacataacggccaacagtggaatcagatgccaatcaatgcgtcgtaaaagcttcttttcttccgcgctactgagcgtcgcacgcgctcgcatcagggtggcatcatagccgggaatgagctcttcttcaaaagactctggagtgtgttctccattgcggttgacatagtgtatatttcctttcgccggtatcggtatttcgtccgcggagacatccccaatttggcccttctctgctatctcagaagacatagtgatcaccaatcagtgtcttttgtagttggcgcacggaggcaaggtactgctggagcaattgcaacgatccagaaagggtatccagaccattaaatggactctattagtatcatatttgctctactccgcaatctcgagcaccaaaagttggttatctcctgcgtgaattgcgcaagatgagcaaagaccactcggcatggcgtgcaaggattagttacctagcgtcttatactagttaagctggggaatctttgccgatagcatagatataatccctgccgtgcgctaaggacccctcagattggaaagccgaatgtgagctatagtccattgttggtctagacagttgaaacaatctgtgaagatgatctcccaggagccaacacctagagttgttccctagtatgtagcgcactttcgtcaatcaaccttgacttttgtcttcctgatatcaatgtcatagatttgatttatatagcacctattagaatacaaacaaataatgctttgaaatcgacagagcacgcgataataagtcatgcttggcaaattcatggctttaaactagtaaagtgaatttgccgagcaaagataatgcatctcgctacattcagtaaaaaagtacgaagtaacgaaaagaagcaaatacttcagggctacgagtatacgccattgcggggagagaattcctaatcggcccctctcacagcacttcatcttttcctgagagtcaatcacattcctctccagtccctaatctttatcagacttcaatgggccgagaaacatgaagaattacctgtacttttacgccgcatctctagcaagagtagcgttggcatcggaatcccaacaacccttgattggagaagtgatcgacaagaacctgcaatctccaactgtgaatttaaaaagaattatcgacgaatctcctctcttatcattccacagagacattgtgcaaatcccatcaatcagcgaagatgagaaaagcgttgggaatttcctcttggacttcctccgctcccacaacctgaccgtcgagaaacaaattatccctccggggagtgccactgagcaagaaagatttaatctttacgcctacaccgggagagacaggttccccgagctgctgctgaccagccacatcgataccgtcccacccttcattccttactctctgcatccaccagcctcagacaaatcaggggatctgacattcaatcgatcagacctgatcatcgctgggcgcggcacggtggatgccaaagctagcgtcgcagccatactattcgctgcactggaaacactagatgccaacccggatgcctcaatcgggctgttattcgacgtcggcgaggagaaaagcggcgttggaatgaaacatttctcaaactccggtctcaacccagcaccgcctaaattccacacagtcatattcggagagccgacagagctcaagctggtcgcgggccataaaggcactctcgggctcaaggtcgtcgctgaaggaaaagccgcgcattcggggtacccgtggctcgggaaaagcgcggtctcctcgattcttcctgttttgtcttacctcgataccctgcaagatgtcctgcctgagaaaggtggacttcttcgtagtgagaagtttggtcagtcgaccttgaacattggggtcgtgcgcgctggtttggccggtaatgtcgttccggcatatgccgaggcaacgatttctgtccgtcttgccgctggaaatccggatgacacgcgagagattgtgcggaaggcggtcgaatatgtgactggtggtgatgggagcgtctatcttgactttggggacgtcgagaacggcgctccgccccaatatcttgattttgacgtcgatgggtttgatgtgattactgtgaactacgggactgatattccttccttgaagatcgatactcaaggaggtccaaaagtgaagcggtatctctacggaccgggtagtattcatgttgcccatggcgatgacgaggcaataaccgtgggagagcttgaagaagcggtgcaaggatacaaaaggttgatctcggctgcgctggttgcccactagatataggccttttttggcttgagagatagatgaatgcagcatgctacagctatgatactctacgctctcatatctacgagtctacaagcggtttgctggtgggatcgcaagacatcgaacccgaaatcgaggaagcccggtagccacgacggccatcgactggactgtaacactcgagctccctgcaactgaggcccatgcagtggggcccaatccccgctggtgctggcaggacatagaagtgagtgatgaaagcaagttcgtcacaaacaccacttcacatatgcctcgggtgcaacgagaattcagcccagcccaacataggaatggccgggcaccgagcccatcagtagcaaaccgcggatctacacccgagacgggcagtcagcagcatctgcctggagataaaatcttcaaggcacgacaccaaagaggaaaaaaagagggatgaagcatgcatgtcctttcgctggtattgtccagatcaagttttaacggtaatatctcagatcgaggctcgcgcttttggaagaccaaaaacgcaagacctcgaacacccgtcatgcgtgctatagaaaacacacttaccaaaagcatccttatagagatgccagttcaccaccttttttgttctcatcctgtagtcccgatgactatcagcgaaagggaagctgccgtagaactcctaattcaaacgcccgtcgtatcggccgagatattcgtcttctcctcacgttcaatggagtgctctgtctcggtatctgtgtcaacaactttgatatgcccaaaccaattatcattggacttgcgccaccactcggcgatcgcgatgatagtgacaccgcccataatcacaatcgcgtagttgaacaaggtcgaatcctggtcaattgctttgtccgagtaagccggggcgcagagaacagcgaaagcaaatccgttccacatgaatgtgacaacagcagcgataatgctaaaccaacccaaatcccaaaagcctggacggaacgatttacgcgtgataaacgctcggcccattccaaccaatccgtatgctgctagggaacccgcagctgaagtggagaccaagctggagaaggccacttgcgacgggagctgggtgcatagcagaagcgcggcaataactgaaatgaagatcacagagttgtgaggctgcttcgacttcgacacacgcgatagcacgtcgctgaatgggaagacaccatcgcgtgccacggcgaatacaagtcgcgatacagcaaccaaagaaatcgaagtattgagaattgctccgatcatcgcgacaatggtcatcacaacgtgcgcatggggaccgagcgccatcgcgtacatgttgatgaacggctgaggtgcggtagtgtcatagaatgtgtcgatcggaggcatgcagaagagaaacaagatgatgatcgggaagccgcacagcgcagacgcaacggttgcccagaagatacccttcgcggcggctttcttagcggacacggtctcttcggcgacatgacccgaagcatcctgtcccacgagacaactggcgaccaagtaccaggacagaacccagttcaacccaggactggtatccccgccattgtatgtagacgtaaacacgtattcggctgactggaagccgtacgtcttagagacgccaatgggaagccagatgaagttgagcagcatatcgatgataatgatcgtcacacccgttctgaacacccacgagtacatgcgcgggggcaagaaatttagcgaggtagccatggccaggaaaataagcgagatagcccatgccacggcacgcgctcggacatcggccgtgtcgtatgggaagctcgtcttcggattgaacacgacaacctcggaaatcaggtaattggcgacaccgaacgaatcactcgcgaggaaggcagtccacgcaaccaatgtccatgcggcaacgaggaaggagatgaagcggccgacttgaccgcctccccaggatcgaaaagcccagtagtaaattgaccccgcggctggatagcttgaacaagcttcagcgagacaggcggccgtgacgacggacagaatactaccggagacccaggagctccacctaaggaagttgttagtgatgtgatcaatgcgaaaaagcgcggggaacagcgcggaaagtagaacatacatggcagccggcccgcctccactgagggcgatatagaaaagcacacgaattcctccaacgcaattcaaggctgagaaggagcaggcgaaattgtcgaacgagccccagcctcgagccaagacagagcgatagccaagctttaggaggtcgcgatcatcttcattggtcacggaaactccatcggagttctgggcttgatgttcactgttctggacatcttgcggggagttgggtacatcgagggcaacaatgtcagggaaggtcatgatggctgctcttgtttttttgtcttttgagaggcttggcacttgacaatcgctttcttttttttcccaaagaaaaaagttctaattcaattaactttttccgatccctatatcacgtgggccgatcaatggaccccgacaccggggtttgttcaagggtcttctgagccattattgatttgaagatggaatattaaagcatcatgaggaattgactagaaatgctacttcataggtagtgaagctgccaattgatagtatgttgttaactatcagcttggctgttgtccgggtgaaggggcggggtcaattattgacagcgtgtcacgcatagtggttgtaccgtactccctataagtatactttggttgaccgctcattaatccatacaataaatagcatacatacaagacccttgctgaaaaagaaaggaaagcacttcattggcaattattaatagtcgtaaacaacttgcagccctagagaggtcttatcgtttcaatggcgtgatcatccataggcggaccgatcacggagatcatcaggtattgataccatgcgaggactgaaaataacagtaaattacacaatatcccacacgatccggtcagaaaccctggatcccaggtacacagaagtactgtaccatgtatcataccgtattgatgcccctccaactttcaggtggatcaatcccccattgggattagcgtttatttcctccccctccatatttctttcaccatttctcaaacatttttccttctcttccctcactctctctctcaaaggcatcggatttgtgaaaattctatccttgagacctttttcttcttttccccctttttttttatacacatccgtcagaatggttcaatcgtatgttggctcgactccttgtgaacagtggccgacacagttgctgactatctgaatagatctgttctgggtttcccccgcatgggaagactccgtgacctcaagaaggccaccgaggcttactggtctgacaagatctcccgcgatgagctcctcgctgagggcaagcgtcttcgtctggagcactggaagatccagaaggatgccggtgtcgatattattcccagcaacgacttcgccttctacgatcaggtcctcgaccaccaccagctcttcggaactatccccgagcgttacaccaaatacaacctcaaccctctcgatgagtacttcgccatgggccgtggtctccagaaggagggcattgatgtccccagtctggtatgtgcaaatcattgcatctggtgtctgaattcaatgctgacttaatcaacaggaaatggtcaagtggttcgactctaactaccactacgtgaagcccactctccaggacaaccaggagttcaagctcgctgccgagcctaagcccattgctgagttccttgaggccaaggccgccggcatcatcactcgccccgtcctcctcggtcccgtctccttcttgactctgggcaaggccgaccgtggccagagcgttgaccccatcactctgattgacaagctcgttcctctctacgttgatcttctggcccagctcaaggctgctggtgtcgaggatgtccagattgatgagcccgtcctggtcttcgaccttgccgagaagtccaaggctgccttcaagcccgtctacgagaagctcggtgccctcggtgcccaggctccccgtatcaccctcgccacctacttcggtgacatcgtccacaacattgatgtcctctccaacctccagagcctccactctattcacatcgacttggtccgcaaccccgagcagctcgacgccgtcgtcgccgctctcggtcctaagcaggtcctctccgccggtgttgtcgatggccgtaacatctggaagaccaacttcaaggccgccattgagaaggtcgagaacgctattcagaagctcggcaaggaccgtgtcattgttgccacctccagctccctccttcacgtcccccacactctcgccagcgagaagaaccttgatgccgagatccgcgactggttctccttcgctgttgagaaggccaccgaggttgtcgtcatcgccaaggctgtcaccgacggccctgccgctgtccgtgagcagctcgaggccaacgccaagtctgttcaggctcgcgcttattctgcccgcaccaacgaccccgctgtcaaggcccgccaggccgctgtcacccctgagatgcacaaccgcaagtctgccttccccgagcgttacgccgagcagaccaagaccctcaagctccctcttttccccaccaccaccattggttccttccctcagaccaaggagatccgcattcagcgtaacaagttcaccaagggtgagatcactcctgaggagtacgagaagttcatcgagaaggagatccagctggtcgtcaaggtccaggaggagctcgatctcgatgtcttcgtccacggtgagcccgagcgtaacgacatggtgcagtacttcggtgagcgcctcactggttacgttttcaccacccacgcctgggttcagtcttacggctcccgctgcgtgcgtcctcctatcatcgtcggtgatatctcccgcccggctcctatgaccgtcaaggagtcgaagtacgccgcttccatctcccccaagcccatgaagggtatgctcactggtcccatcacttgtttgcgttggtctttcccccgtgacgatgtccaccagtccgtccaggctcagcagctcgctctcgctctccgcgacgaggttgttgaccttgaggccgctggcatcgctgtgatccaggtcgacgagcccgctctccgtgagggtcttcccctccgctccggtgacgcccgtgttgcctaccttaagtgggctgttgactccttcaagctgtccactgctggtgtctccgatggcactcagatccactctcacttctgctactccgagttccaggacttcttccacgccattgccgctctcgatgccgatgtcctgtccattgagaacagcaagtctgatgctaagctcctcaaggtcttcatcgacgaggcctaccctcgtcacattggccccggtgtttacgacatccactctcctcgtatccccaccgagcaggagatcaaggaccgcatcgaggagatgctggtctacctcactcctgaacagctttggctcaaccctgattggtttgtgatcctggcgcgatatctaattttctttttcttcatgctaatatcctttttttacagtggtctcaagactcgtgcctggcccgagactaaggcggctctcactgcggtaagaaatggcaatagtcttgaaaacaatgttcaaatgctgataaacacacagatggtcaacgctgccaagtacttccgccagaagtacgcgaaataaattatttcaatttgccattaatttaatgaggaggcgacaatcaacctgtcgcctcagtactggggagttttctttattgatgagttacgacgatgataccaaaagttcaacatatgggtttcaacgggttttctagaggataccaaaagcgggcctggagtttcaacattactgactattttaaactggcgctagccaacattacagcctactttcgttgtggtgttcggttgatgctagttttaccatttcaacattgtgtggttttccacatacagcaagctctacaaccttgcttgatcaagttcgcctcgtgggatttgatctactgcctctatcatagtatagaatcagttgtcaatattacaattaacaatactctgtgtttcttgtagttctgtgtagcctcagtaggtttagttgatagcacctctgccgtggaaatccggtgcataaagccgttgatttgatttctgcaacccatgttcgccgctcctcgttatacctgggacgtttaacttgactagcattgcacgctaacactatatgataaaatacccataggataattttccattgtccttggtataattttccttcggtcggtagcggttgcacagtcattctaatcttgactacagctgctcgtcaaccatatcagcacggaagaaagagcagataatgtaagatctgtcccatcaactcaagtatactgctttgctattcgcattagattgccagactcggcctcaaccaagaaatccgccagtccaatgcgggagttagtacggagaatatcctgtatccataaacaaaagacgagcagattgtgaacacagcgctgatggtatatagagaggacgatatgaggtgttcgtggccgtcgctaaatatgacggggggaatgtcaaacctcaaccacgaacccttcaagttatcctttttaactatgcaccaatttggtggaatatacacactggatgaatactctcagcgctgtattcacgatttattgtcttttgttggaggatctagaatggttgccaacccaggtatcctgcttcactatcagtatcagattgcatggcccatgtgcccccggacgttgaatagtacaacaacaacaagtatcagattattagaagaatcggttccaggtcatggataaacccactagtccaatgcgaaatttggtaaagcttctatatcctccaacaaaggacgagaaggtagcaaatccagcgctggtagcatatatcgaggacgacatgacgtgctcgtggggcagccatttcgagaggttgctacgacccgctccaaaaatatatgaagccatgtcttgagctatccagcaccatagcagatcgcacttcgtgactgcaattttcttgattgcccaaatatttagcaatcaagaataaggatggatttcaaaccacagtacaataaagctgccagtctaactaacaaatacgtgtaattccgatcaaggaaccagacgccgttaccaacgccagcgcaattcaccctaaacaacttcaagaatcaatattcccctttgtttacttggaagcggtctccccgggatttgatgactcacctgccctcccattagcaacgagttttgacgtcagaagagccgaagcaacttgagaggctcgcgggtcgcaatttcgaaccgctaaataaccgtgtcccaagatatgtgacgcaaatttctgtcgccttcgtgaaacgggctaagcgtttattcggcgggtgccccgggactctggcgactagtaactgatcgagatctcgaggtagtttgaagcgcgtacactacttgagaatgtcgcatatgaatcaagagagcaggccaagcccttgaatataccgaaataaagggactcccatcctcgtcattcgacaggggagcttaccgcaacacttctatatacataattcaagacgattgctttctagtcctacgaggagacctagggagtaggccacttgtctcctgtggagtcacagccacagctgtaggatatgtaacccttctattccgaccttgcctgggacttccagtccctcggtccttgagcctggtactatagcgaacctggagagaacccttcgtcctccctggaaaatgtttcacgatccgactccacgggagacctcgtttttccttcagttcaatcaaccgttcgtcctcatcgggcaggaaacgagtcgcacgcgctggttgctttttgctgcaaggttaagctgggtttcaataccagaacagtttggcgactctgtggagggaccattgccgttcttcggactgtgaaacccagtgaggttcgactgtagccaaacgaactttgtgaaacagggcacaggagaataatgagtattggaagtcgactctatagaggaagtgccaaagggaagaagacactatctgagaataagacctagtacttggcaaaatgtttgactgatatttgacaaagactaataattcttgcaactcaaaccggggaatagcagtccaccgtttgcctgcagcgaggtggaccgtatcggtgtcttgacacatcttcttcagtgcctttactcttgccacccgcggcttgaactgtctcgcctggtacgcctctgtgtaaagaatagctgctcgcataggaaatatatccagaatgatgagaagttgcagccttgcggcccttaaggcatatacaatagcgtacctggagggagccttccgaccttctaggaaaatacgttgcaattcgcttctatagcaatctccgctcttccttcaattcaatcaaaagctggttgtccttagacaggattccggttagcccagtcgctttcctagagtaggatcctttctggcggggttgcttataattctagctgccaattttatttttataatatgatatagctttacctaatctctgcgagtaggaatgctctgcctactcttcaaaggtaactaaatagatgatccttaacaaaagtatctcccgtgtaagaaaccacgaataggaatcgtttcgatatcgtgcaaacttattagggaagtccgatccgcgactactagggatgctgacaggctctccgcatcacaacgctatagcccgtcttcgtcgtcatgagctacagccctgtctttctcctggctattaaccacatagctttcggaaacaggctgttattatacttcttggctggcatgctttccccgataatataagctaccggttctaattgtaactcgtctaccttaattctagtatctccaggtaataaatgcgttagagttgattacttttcctagcccatagggttaagaatatagccatttactattatattaccgtctactatatctattatcgggttcgaatatagcaaaatgtctccatctattatagcttcatctacattctaccatatgagccagaggactaggtaacctagctgactgagagagcactaacctatattttcatatacttctgttcggcttagaaattcttcctctgccactaggatgtagaggccaccacgtaccattatgatactagccggataaaccctgccctaaagcactgctagaaatatcatccggcaattctcgactcgccgtatatatattcgatacagcaacgtttgcatttcttcccgaggaggcattcaagaaattcaaactcattcgagcagtcaatggtcacttcttccgtaagctcgttgggggctaataacgtctcgacctcactagatgcataggactgactttgaaggtaatatctcctatttcaacggcaagctctgtgacgatctgagaggatcgtacttgcctaacggggcaggagcggtcacgtccttgtacttgccgcaggaacgactatgccctcgcaccttcccaaaagaacgaacgagaattaagcgagacaaacgcaagagtataagaagggaagaacacgcacttagatagtttctctttttcctttcttcctcgtacttagaatttgattggaattgcactcttttcttttgaatcgaattggctcgtaacaagctctacaatttccccgaggaacctctatcggattcaggactcttgcagaatggtatctcagctcgccaataacgataggggtacgtcctcggtcggattttgttgttctttctttgttctttctttgttctcttttttgggtagcgaaggcattggattatttgtacacactaactaaattgatcttattattggtagtctttttagacctcttggccatcgtttattcttatctttcccttctcgctttgatagctaaaaggcgagaaaaagggtcaacagtacagacgcctttcctatgtataaccaaggaacagttacaatttatagataggaatagcattaagtcacggtagaattacccttaaaacaccccgaggaaatagaatttacaatccaatatgaattaaaccagtaattgaactagtagcgctagtcaattgcagaatgtcgagcaaatagccgaatctatccaaaaagtcttggcacgacgctcctgacgtgactgcgagatgctcagcacgtgaatctcgttgaacccttacagccaatctccccgcgatcgctcacttttgattcaacatttctccaatatggtaccccgaccggatctcagggaattgaaacaaaccgttctcagagcacccaaggatcgaaccctgcggtttagagaagatggaacatttcacattggagtctttgaggatttgcatttcgccgagggtatgtgttgataattgatgagaaatggtcttttgttaaccccttgcagacgacgaaaaagatgagaagtccaaaaaagtgatgtcaacgattctctcgaaggaggacatcgacttcatagtcataaacggcgacctagtctcgggcgaaagaacccaaaaagccgattcaaaaaaatatatcgactcggtagtttccccgcttgtcgaaaagggatacagctgggcatcgacctacggcaaccacgatagcgaggttaatctcaacccggaagatgacatgctcgaggaggagaacaaatataccaacagtttaacgcagagtatgatctccggcgacaaggccggaataacaaattattatctgcctgtgttctcacatggacagacgaataccagcacgccgacgctgctgctgtggttcttcgattcgaagggtggacattattaccagaagcaaggagagactggacctgctgttaaacggcccagttggattcatgaatcggtacgaaagcccctatattggttcgggaaatgactgactggctgcattcaaggtcgttgaatggttcacgaaaaccaattccgaactgaacaagaagtatggcaaagccattccctcgctagcattctatcacatccctgcgcacgcgatgctggaacaccaacaaacaaaaggtgtaaatccccacctgaatcccggcgtgaatctcgagcgcgtgaacccgcaaggaaccggcgaatggacctatgacggccaggacgtcaagttcatggacgcactccttcacactgaaggcttaatcgcaggatttagcggccacgatcaccaaaatgactggtatgtgtctaacaggcagataatagtgacttgaatgattcaaacgctaaatctcgcaggtgcttcaaatggaatggatctcttgtcgatcacgatctaaccgggaatggtatcaatatgtgctacgggcggcatacggggtatggcggctatggaaatctggcccgcggtggacggcagatcttactccacgaggataatctcgcaaacgacaccgagacgtggattcgattggaagatgggtctgcccaggctcatgtcacgctaaacacaacttacggccaggatacttatcctgctgttactaacggtgctggaaagcccgattcctccatgcagggctctttgcttcctttttcttggctgtgggttccgcttatgatgttctcgcggtggaagatgtaataataagtgggttcttttggctataggtcttagattgctatattacttttggacctgatttatgaatgtcttgaatattttgaggatagaataattttcttgtcttcccgagtattttagtcacttctcggcctaaatggattatatacaattctatcttctgtacaatatgacttcctccactcccattcttgccatcttccagccaatccgcagtccaggggtctgagtatatacagccaataacgaccacctacaggtagatgtagcagaaaggaccggagacggtgctcatgagatcgcgcatagcaatatccgaaccaccagcataaccaatgttaatgagggtgtcaagggtagtgttcgccgaagccgggctgttcaagaaagtaccggtgccagaaatagcattcagacgcttgtgcaggtccaagttctgccagatccaccaggtgcgatcaatcataccgtggtggagccagaaagcagggtcaccggggctgacgaagacatcacgggccggatcaccgcccatggagtagtgaccgccaccgtggacgccgatgttgccgctgccggggacaccctgcatgttcatctggaagtcgtagacgttgtcgtggcgcaggatcaggtccacgaccgcggtgaagttggcgtaatcctggacgatcttggtggtcagatcgcgcttcaggcagcgagggttgtaggcgaaggggttctcgctggtttggctgccgccgccggggagcatcagggtgacggggcccaggttgacggtgtagtccttgaaggggccgctggtcacgcagccgccgccgttgccggtgggcaggtagatgatcgggtagtcgcccagactcagctggatgtcgccggcggacgcgacggtggcgccgtttccggacatcgaggtgtcgctgccgtcgaagacttgggatgtctccaggttgccggcgtcagcgggccagttccagtagctgtggttatgttagatattggtaattttttttattttttattatgtgatgcgattgacttacgggtagtcgccggtgtagccacactcgttgcgcatggcttcctcgaagttgtagatgaagtaccggtgccacgcgaggaaggttccggtgaagtgaatctccaaagtctggttgatgtgggttgcgacaaagtcatcgtaacgagaccgcgcaccagggacctccgcggaaggagtcaaagaaggcaacttctgcaggcaaaggatggagctgatgtaggacttcttctgggtgctagagaaagtcctccaatcgcgacggatgcgcagattgctcaaggaacaagtaccacgcttggtaatgtccgagtcgctcgagacagtatcgatggtggtgttgtacgccaacccagccaagtccgcaagctgtgactcagcgatcggcagggaggtggaagcagcggtgggagtcgcgctcgcagtagcactgtccacggcagtggggatagcccacgcctgcgcgaacaaagctcccagagtgagaatggagatggcaaccatggtggcgagttgacaagagcttgggagaagtgttgagccagaaggaatccgggcatgcttgttgatttaatagcttcatcgcccctatcttcgacgtccgagtctaactcgaagcatgcgcttcttgcataaaatccgcgggggtccataatctcccctcttctgctgggaccatttagggcaccgggccatacgttccgctttctccaccgggagacgccggcaatttgctatcgcactttttcccttaaactcagggttttcggtctattcagggatcctcttccctgcaaaaaaccgtcgggtcacttacggaccgagccttttagactctggggatcccatcaactccatatagggacgtatgacgagaaacgcatattactacaataaatctgaagcaaataggaatcagccaccacgtggtccccttgtcgcttggcaatttcagctaagcgacaatccctgtggccgtctagaccctggaagaatccaatttattgaatttggccaatttaacaacgtggtcgctttgggaaattaatcaaaatccagccaatctcggagtcacgcccctcctagtgccctagctgcggccaagtccgtaaactccgactgcaagctacctatgcaacccttcccagtacatccgaggggctcatctccttgcttttcttaccgatgatgctccgcctgctcattggccatgtttcgaatgacgaactacaacccggctgccgggtctgaggcgtattctggaaacctcttccattggagggaatgcattgtttccatgcaggcgtcgaactttcacggaacacagataatggcatttgcgttttcgtttttattatgtccgacgtcgcttgtgaaccgctcaaaggagactgttgacccgaagttgaagaacaagatgaaaccagatgattggcctgtggtgcttaatcgaagtagaatagatgaaaaaagcccctccatacgagactcacgccaccttcctcttggcttcggggaccacagtgataacttggtagagctgactgtaatgcgaaacctatgatacggtgtacggggttctatgtattaaatctataacctttgggatgaccctgtcaatttggccccgagtataatccctgtctgacttctcctctcgatgtctccttcataactttttacgactagccatgtcggacggtccgcatagcagggatgtgaatcccccagatgtcaatcaaggccctaggattctcatagccacggctatcactactttcgccgcgttattcaccgttttggccaggttctacgtgcgcatcttcctgattcgcaatgtcggctgggatgactatacgatggccctgaccatgctgctgtctctctgcgggttcgccattatcgtccccgaggtgatatacggtgcaggcaggcatatgatctatgttcaagaaacgtctgtaaaggcaatgcatttgaattatgctacccagggcatttacatgtgggccattggcctggtgaaggtatcaattgggttgtttttgcttcgtttcgcacctcgaaaaggatacaaggtctttatctgggtggtcattggtgtgtaaaggctttatatcttcttctgcgtcttactgacgagcccggcgcattgcagttctcatgactctctacactgcgatctgcttcttggtgcgtgccttatccccactttcgatcgacagcaactaacaatccgatcgatcgcagactcttatctttgagtgttcagatatccgatcaaattgggatccttcggtgaaatcaaagtgcttctctcgtaaacaacttttggttctgacctatacaaacactggtgagattcgctctgtatgggtttaaataaacgttttttaacttgaacagcattgaatatcctgactgatctgatcttcgcggtcctaccggttttcatgctacggtatgctatggtcatcgctctcttccgatgagatgctaatacaatacagtcatcttcaagtcaatcgccgagtgaaagcctctctcatctgtatcctaggcctgggagttttgtacgcgacttccaatccaatcccgtcataagccatgctaattcatctactcccttagtgcctgcgcagccgccttcgtcaagctctctatcctatccagctatggcagcgccggcgacttcctctgggacttttcaaacctcacaatctgggtcgtgtaagttaactagttatccaccactttaagccattctaacaaaaaatagcacggaatgcaacacaggtatcatcgcgggcacgctcccaaccctcaaacccctcttcaagagattcctcggcacatacggctcccaatccaaaacgacacgcgagtaccccggcagcaataaatacaaattgcactcgatgtcgcgatcacggggcggaccgctccaatcccgcggccacaaaagcggcaacctcagcgtcatcgagtacgatgccgacccgcagaaccaccgctcccagctcgcgtctacgaccggctcggcggcgtatgcggggagtcaacggagcaattccagcgaggagcggatcttgccgattcagggtgagggcatcgtgcgcacgaccgaggtgatcgtttcgcgcgagcagaatccgccacagatgtcgcccggccccggacagacttcgccgagattgaataggatggggtcgctgaatggattacgtatcagcgccgatgatagggtttaggatttgttttttcttttgggagttatagggtggcaagtttattcatattgatacccgaagactacaacatacatgggcatataatctgtgtatctataataaaacgttgcccggttgttacacattcttgaaaagaaaaagagataactgtcttatctgtacattgcgctaggtctgcaaccgaggtactctccctttgcattccgaataaggggcaaagggatgacgatcaatcgatatacgaagtaacaaagtgattctgtattatattttgagtttgatatatgtaaccgtaacaaccgtaacaattgaaactttggaaccttcaaggttggagtcgggaaacccccgaattgtttccatggttcttttattcttggtacgctccaccaggtaccagactttcacccacacccgcaggaagtatcttttatatagcaattccatacaaaagctacctatttacagccttttttacgggtggttacgcctactaccccagtggtgacgcatacccaagcgtcgacccttaggggtccaagggtcttaagggttcagagaattgcgtgcaagtatcttttgtattgagttcctatataaaagatacttgattttacaattcgtgatccacctagttatgtagcttaccccaattaccagatccaggtcgggcagatccgaacccagattcggtatgtatcttttgtataacgtacccatacaaaggatacttgttaattttcctcagccttcggactggttagcgggaagcgcaccaatatataacgcgagcctagctccaataattgaatgcttctaacaagaaataaagtttaaaaagacactaactatatagtacggagtacggagtagttgcagaaacaaacgaaatgccgttcctttaatatgttaaacattcccattaaacttcaattaataaggtagactttctttgaattttatcatatcttgaaattgatcttatgccgatgatgtacttgggaagtatcttttgtattggccaaccatacaaaagatacataatttctggatatggcggtatttaccgctggcggagaaggtatgtgcgcacggttacatcggacattgctgttgcactccacttctcttctaaatgtctcacattgtgtcggttagcctaatgctaggatagtggcagcaatctggatcacttgtggaatcctacaacatatccagggcacaatcctaagcgcaacactccctaaccaggactcgaaaacgccagccctgaacctcatcgacacatcgttgtccccacttggtacagccgaagatataacccttgaaccaggacaattgagcatttctatgctacttgtccagatggcggcatacttaaagccacccggaagctgaaggatatgctggacgagagaatgctaacacttttacagtgtgaccgaaggaattcagatccagccagaaacaatcgtatttggatatcaagctcgggaagccactaacgagaagaataaaaaagaagatatcccggagagctcccatttcacatccacgcacacccagggactacagcgcccctcccagcaacatcgttctccccaaacttctcaacataccactttcgtccccagcgcgcatggggcaacatattcgtgaccgcattgacaacaaacaccacagccggcaaaggcagcggcacagcgagcttattagccgcccacgcagcaggcaccaaccacggcgctagaaccagcgggggagtgatggccgaagtcgccgagacagaggccggcagggcggagaaggggacaactgccgtaccagccagagcaaagccaatccattcgagccactcgaacacgtagtgcggatacaaaatgtatcggaagacaccacgagagggtgggatgacgtagaccttgtggaacatgtttccccccgcccgaggttggtcatctgcctttttggcagcgcgcttttcggcctcttcgcgccgaagtcggaacagggctgtctctgagtagatgttgccggccattccgatagcaaataagattacgcccgcggtggggaggagatctaccaccgcggagcggggacttccgctgctagccgtgaagcttgggataatcggcactgtatatccgcgcaaccagccggccagacaggcggagttgaaccaattgaagaccatggcgaagaccatgatgctggcgtggattggggacatactaggcgcggagaagaaaggggagatgatagcgcggttgaaatagtgtgtgcagtacagagttacgatgaggatgttggaaacagggagatcagtgaaagagggtgcatatggcgatggagtgaccatgctatagatcaagttgatagggccgacaatctccatggcagaccaggcgatacgtcctgggatgttgaagatggactccgaggaggttttgcctgctgggtgccaggacagaatccattgaattgccgtcacctaaatgtcccgagttagtctggtagcatctctccaaggcttcagggtcctgaccaggggaaagtattggaagcagcatataacagaggtgtagacagttggggatggagggaagagctccacagcaggaggcagagctcccaagcaagtggaaatagtcgcacccatttcgattgagagaagagatgaagggtgaagatggcggagggtaaacaggaagcttaaagcttatgtggaaggcggtgggtcccgggtaagcacttaaacttctgctttttgtttttcttttttttactttgtttagtcttttaaatcttttagaagaacaaagcctgttgggtatattcctgttgggtatatcgatcagtatggcaatttctaacaagatcggtgaattgtcgacttgagaagggcacatacgggacaattcaaacggggtcgtgcaaacgaaagtcctcctacaactacaaagggtaagacaagggcaaattaccagtttcagcaagtcggcgacaagactatgttcgtttgattctctacttgacaaaaatcacatgtgtaaataactaaggggatgattccacatagacagagtgtattctgtaccgtaaacgctaatgccctagacaagcaagcttgtgaattaaatcataaaaagctccggctccttaatttgaagtgtccatccgatcatgcaccatttccctccgtttgccagctaatttctcatttttgaacgcctcaatcttggctttgagttcggtatctagaaaggtggttaatactggtattggaacaatacctgggaaagaaaattacttaccagctactacatcctcaatcttcaatgggacacggttaaatggatcgtgggggtcactcaggagatgcgagcgaattgtagcgcggtcgatggcgatccgtgagctgggaagtatgacgggatcatccatgagggaatacattagaggatctaaaaaattagcagctgtcgaaaaaggatagttcaaaaagggaaaaataccgaggaactcttcagggatctcgcccatgtcttcctccgcttgatcatcggcctccttggcagcctggaccttcttctgcagctcactccagtggtgaagctgctcgggggatttcagcgaccactttcggataatatcagccgccttctcgaaattggctggcttgtaggatcggccatcacgggcaacagccaggatgaagttttccttgccgatcagattaagatagacgtcgacaatctcactcagaagagcgcggggattgaagccatattcctgcaggttgtccactcggagattggagctcttgggtcccaccattgcgtcgagattgtagtccagcatgtctgccagtcgctgcacaatttcaggcattgtgaacgagtcagcaagcgcctcagtgaatagcttgagcattgccacggtttgattagtcagttgcatgtagctcttggcgctgcgctgcgctgatgacaggttctcctcccgctgttggcgggttgcggcatccattgagttgccctgtgtattcagctcggtctgagtgttgtggatagtcttgaaagcaccgaaagattcatcgaggacgtaagtcacatcgtttagtagaaggttaacgaattggacgaagaaatccaggttctgattggcttgaagggacaacttctcccgatacagagtgttgggccagatgcatttgatgatctggaagatctcgtaacggatgttaaacttgtcgtagaattgggaatgtgttcccgtgaactctgcctcaatatagaatttcatgaccgcatggaggagatgttcgttggcaaatggcatgctgttgagcaagtcgactaaaacaccactggcgccaccagggcgcttccaggtgcctcggaacagaatggagatcagtccggctttcagatagggattcttaatataggtcgagcactctaggaatgtgatgcacagcattaccagctcatctccctgggtggccgtaatgatctgtggcatgcaccacatgataaacttgaagttactgacaacatcctccaagaagtactctggtagacatttgaagacttcgggctgctcctctggaagaggcagggtaacttgctctttggggaagttctttccagacacaagtctcagaagccacacggtaacatatcgcatgaatagcatagaacgagcctgccactgctcgtcgaacaacacaccttggagactgtatttgagagcgatgcccagttcgagcttgtctttgtacttcttcagggccgtatcgaaggtgcgcaattgctgtggattgttgagccaacgaacccgctcaagttcaaatttagtgattgtactctccatctgtcgcacatctttctcgagttgctccatctttgacgtcaatgattcactgccgtagtgatgggcggcgacagtcaggaagaatacttcagtgataaagtttgaagttccctcaaccttcttagaatagaaagcgtcggaggcatgctgatcggcattgattttggtctcatcccgcatgtcaactcgagaatcgcggtggagataatctgcatcaactctgtcgattttggtgaatgctgcatccatgaacggctcacagagctggtcgaggcaagttgtaatattgaacatgaagccgtcagaggatacttgcgcagggtcaacctgcatggcccgtcgtttgtggttgatgttcatagcagtcgcgaaccaatctaaaacacgatctcgagcctctttcgaagcccggatcaggtggttgataacatcaagaagatcagaactgagcatctgctgcgtcattcggagcgatcgctgggcattggaaatgtatgcctggtccctggtcttggggctagagaaataggacagggtaacattagcttgaaggggtgagaggcggaaccatggacccaaaagagtggctttctcgaattgagcagggtcccttgtgttgttgaaaatggacgattctgtgattgctgccgcgatggaaccgtggcgaacaaggtttcgaagagcctgaacaaactggtcagacgtggtccagggaaattgtgacgtttgacttacaatggcgtatggcttgtagtcatcgttaacgtccatagaagagagctgcgcgctcaactgctcgacggcagagataaaggcaggcttgacggagtcgtcttcgtcgaatcttctcacagcttcgttgataaactcgaaatcaattcctctatcatcctcggggtcgatgagaagatacgaggctaacgatgattgaggggaccattcgctcctacagttcagtcagtatccagtgccagtgtagcagcattccagagaacgaacccaaacatctctggcattgtaatcgcaaagatacaatagctcatacacaggcgccgtgcctcacacagaacctgatacttcgggtcatcatctcccgtccgcctcaatcccttatacagttttgtgatgcgcttccagcacggcagcagatagtcgagtggacgctgcttctcggcctttgacgcagcctctaggagggcctggtccagaacctcaacctggatgcgcaagtcctgaccctcatcctgcagttcgctccgaagcccaggcaagtatgtacggctgccatgtatgtcacgatgcccttcttccttgagggtcactctgaacacggcacttagtgttcggtcttcgaaggcctctatgctttcgattttctgtggcggaggggtgctcggggctgagggagcggcgggtcgtggttgctctgatgaagccgcggccggtgtgatcttgatccgcttcccttctgactgctgcggggttggtggcgcgttgaaaaggcgactcggtggctgcaccgacagtggtgattgtgacggagatgtgttagatgagctctgtgtcgattccgaggcaccgtcggaggactggcctgggtttgagagctttgcaagtcgcttgttgcgaatcttttttttatcaagatagatgtcagtcctcgagtcgagtcactgcgggggcggtatagcttcatagctcgagtacaacaagaaactaaccttgtctgcgtcggaaagtgtgtccgacatgttagctgatggtcagacaataatctgctccagagaggttggcaagaccgctaatctggtggatcgagtcggcagaatatcaatattgtcgtgacggtgtaggaatcataaggcgtgaaagcggaatcaggcagctttaaagcctcgaagtgggggcaatggagtctagaatccgcagatgtatgtcgctggatgagcacttctgattccgtgatgatcgccgagattcgcttttgttctgattcgagattcagcgcggtgatcgaatttgactaagcaatccatggttgggcgtgggatccggggtacatataaggtactttggggtttgcgctaactatgcgcaaaatgccaggtacctatcaagtcactttttttttcctttcatacgttcgaaggtttaggttgttggaacataggaacatcttttctatgaatatactgttctagatattaaaaattggataacttgatatctacaggatttgtttatgtttcagatttatggccgcaacctcgacgaacttttgtgtgacactatatatatcttcatgtattcacatcaggacatgacatcagaaacgaaaaccaaagattcttaaacatcaggggaaccaaaaagagaaatttagcaagatcctaaatgcatttgaaactccaaaaaaataaaatgtacagttgattaactgagacccagatgccacctttgtggatgggctaatgatattagagcacgttcttttgcaaaaagagcctccaaaaggaacaaaatgtcataaaaaggcgcggcgtaagcctccaagtccgcagtgcatttaatatctcaccttcgtcttcagttggtccagacgcctgcagctcggcatctccatcgcacgagccttcttcattttctcaacgtcagggaagagccacccctgcgcatcttgcagccttctctcccgctcatgggcttcggcgtcacattcattccgcagtgtcctgacatattccacctccacgcgcgagtctagctcgcgaaagttccgggcactatagctatccacatcgagggggttcacaaagtagttgaggttgagtttctgggtcacgcggccgagggtatgcggggagacgggggtatcaaagcgataggagggtccggatggggttgaggagccagagaagagagaggagaggagcggcaggataaatagaatgataagcggcaatagctggcgcaggaaactgcggctatcgatctgagcttcctgctcggtggctgctgcgcgaggccggcgacggggcgcctggcctccaaactgatgcactcggaacccggggccacctcccatgttgaagacgaattgcggaccgcctatagtaagacaggattagctcgagtaaaacgaatatcagaggaagctgtagtaccgaatccaccaccgcccattccgccaaatccaccattaaagaaccggttgaacatttcctcggctgagacttcctcgttgaatctttggtcacggccgaatccaccaccgaatccaccgaagggcgacgcgccgctcgaagcgctcggtccgggttggaacctgctatcaggatcgccgccgaatttgtcgtatttcgacttcttttcctcgtcggagagaatctggaaagcacgcgagaccactgccaccgcgtaagaatcaatatgtcaagagtttggctaggggtgctcattgctcactcttaaacgcctcgtctgcgccctcgtgcccgtttttatcaggatgcgtcaacaaactctgtttccggtacgccttcttaatctcattatccgttgacgagcgctcgaccagcagaatttcgtaaaaggccgtaggctggcatcttcgaatccgaagcacagcagctttctgctcttctgtatacttgcgatcctggttaccttgcttatggtcgcgcgacgtcgcacctccgcgtttggcgtcagagccagatgccgaagccgagggcatagcgaccggagtttatgggaaaaatcggacagatttcgaatcaacgtttgcttgctggtgtaggagggaagagggggtcgagagaatcttgagggcgtagacggatagaggagaagcaatcccgcacgggatacggtcgggtcggcagattaatcaaacgtgtgatgagatggccaaagtaaaatatcggcctgatcaagacgcagcaaaatcagagtcacaggagtggctgattcggcgggcatgaattggggaaaaagcgtggtcttaggtgtctttgccaagcggcggaacgtcaattagttacattggacatcgcgataacatcactcgccaacattgaaaccgatagacttgccaacatccccaagtccgcgatattcaattgtgagtgttctccaggtcaaaggtcaattaaagcacaccggtcttatttatatacctgcagcaaacgcaatccttggccgccaaagctcgcggtcttccggtttcatcaaataagtcctcgaagctcaattcctcaccatggcggacgattcaactgtcgaagagaccaaggagacattaatccagcgcttccgagcctggggtggtaagtggtatatgcatatgaatagcttggcttcatcggagcgtccaaacaagcaatgacgccagtgagcactcactaatgtcgtctctcaactgcagaaaactcattcccacccacattactcgcctccatgatcgcagcccagcacatgcgccctttccagttcttcccgatgctctttccgcctgtgctgatcttctccagctatgccaacctgcagggcttcaagacggacactgccggcatcagcggggccgtctcgggactgtatctgcttctcgcagcccgccgtcgacagccatttatgaagaagctgggtgttcggggcgtcgtgcgcggtgcgaccatgggtttggctttggtcaatatgatcggtggtgggttggcgtatactctaggtaggaaggaggaggaagaggatgcgtcatgatcgagtgacaacttataacgacgcgaggaccgcgatgccatgttggtgtcgtggtctgtttgtataatacgtgtatcaaaagttggctcagttgtgcgtttggcacgtgggtgagttcacgactcggtctcggtgggcatgggttttatgaaatatatgcattatcactacgaaatacacttttggagatagactgtaagagtctccagtggctaccacgcctaagtaactacactttagaatttccagaatacagatgctccgacagcaagaactgccgcacctgttcaggaaccagccattccaggtcctggggcgccgattgcgacgcctcacgagctctagttgaactcacgggttgatcagtagggcgacggccctcgacaagctgaatccggtcagcccattccctacgggcgccgtcgctatctcggtcacccctagcaagggccgccaaaaattcttcctgctcctctctcccaccccatccatcgctcgggcgcatagtcacacgtagtcggtgctttgaaaatagaggcgctagagacttcaagttatgttcaggcggatagtacttgagatcgaagatccggatcaaagtatcgtaacccatcagatgaacctgttccattggagtggggtaagaatccgatgcctcgatagcagccgccttgtcgatgaaatagggctttttggtgacgccgatatcgatcaacggaatattttcgacggcatgttcgaaagccggtgccgatgcgagttgggggcggagatcccgagcgaacagctccatcatcgcgagccgatcctcgaaggaggcaggcttggatggcttgtctgcattatggattgcgagaagaaggagcagacgacggcggggtcgggagttttctagaagtgccgtgctgacaatgcggaggtgggcacgggtggggggattgaacgacgagtctaagacatagagagtctctgggtctgcggagggaccggatgggatggttgttaggacttcgaagactttggttgaggttgtgaatgccttcagtcgtgaggcatactgggttcggagggcttggaacgaggacatgcttgtcagttgcttgactgggggtgatcgtctctaggaaggttgcgatgcgggccgaatgcaggtgatcatcgcgataagatcatattgtcaccgccttccaaatttggaagatttactctatgtaaccgacattgaagatattccagcagatggctccatgatactccgtacatgtatttaggatcttctagcggggtcctaagcaagttccattgctactccgtactccgtccaatgtgaatattcctagtctggagagttggagggtacaggggtacgaggcaaattgtaactaatttccaagtgggatgtttcatgttggaaagcttctccgtgccgaccacaaacaggctacaacatacacgggaaacgggaaacgggaaacggaagcgaaacactctgaaaagataacccaagtttttccaaggaccgtgcctaacccaggctagacctcttttaatcaattcatccgatacacttcttggcggattcgagagatgtgccccaccgcctcccacagagacggaattaaagtgcattgtatactccatacatcttcacttttatatggaaagagtagcatttatactgccccgtggagtccagaatgccatctttatctccaacagcaatttatatcccgacaatggcggaagcggggaccctggggacacgggtgggagactgctttatgtgaaaccttcccgtgcttgtattgtgtatatcgcgtattattacagacagtagaacattgaaacttgaacttcccgaaagtgccgcggtcgtaatttttttttctctctgaatgaagatcgtctggattctcgggctttgtttcctcattggaacacatagttatatacaatatactccgtacacaactagtaggaggtacattataggcctatagacgtggccgggtattgtcagacttttctgcccctgggcacgttcatatatgaagagtccgtgccctaagaaaccgtttagcgacaggagtacaaaagtacggagtacacaaactcgtacacaaactcgatggcctaatacccccttttaagcactctatctaaagaataggggcggatacaaacagcatgtcagtgacgccaccgacgccacatcaccttaatccagaaagcccagtcgctaagaggctcatagggtttgccaatatcacgtagtgtgttgtatatcttacggtgagattaaaggtcacagtccaagtgcccacgggctgcttgggatcaatgccaatggtccaatgagagcccggttcctgggacggtggacacgccatccatggattgaccgcagatccaccggtattaccacggttggaggtgaccaatagggaattaatttaaaattgatagtgtagagtgtaattttaaagcgaaattggaggaaatgagttaattaccttggtctccatcttctctgctctctttccttcttcaagctggcatctcttgactacttcttcttcttttcttctctgtgagaagccatacgttccttccttgcgaattgatttcgcatcttgctctgtcgctctttcttcagacacacactcacttacacacacactcgctaactttgctttgcattcttgcttttgacatctctcgtcttacccctccactttttcattgacatccaccgtcgtaccaataacttcatcatggttgtcatgaacaagttctccgttgcccttgtggctgctctggctgccgtgggtcaggccactcacgagggtctccatgcccgtcgcatcgtggctcgctcgcttgcccctgtccccgaggcctctacggcttctacctcgaccgtcctcgttgtgcctactcctgtcgagccagttcctgaggctacttcgactgccgcgtctgctcccgctgaggagacctccgccgtggagtcttcctctgccgtggcgtcttctgcccctagctccattccttctgttgcttcgtctgtcgttgctccgtctgtcgttgccccgtctgtcgtggctccgtctgtcgttgccccgtcggttgttgctccgtcggtcgttgcctcctcttcggtcgtttcggcccctgagttgagctccgcgagctctgtgcccgtgttctccagcaagcctgtggtcacccgcactcccatcagctctcgccctggtcttcccaccaagtcttccgatgccctgtccagcaccgtgtctgctcctgctggcacttccgcccctggtgaggctgtcactgtgacttacaccgtgacctctggcgcctcgactagcgtcatcaccaccaccatctacaagaccgccactgaccagtacaccatcactgccgtacgtgttagatctgatatcttatgcttggtacttgtgaactaactttgatatagaccgagtctggcgctgatgccgctgccactaactctgctgatgcctccgccaccaactccgctggtgcctcggtcactaaccccgctgaggacaccacctccactcggacctccactatcaacagcaccaagaccaagaccgtcactctcatcgagatccccgcttccaccagtgctgccagcagtggctctgattccagcagcggctctggttccggcagtggctccggtgcctgctccgccgttaccgttaccgctactgtcactgaaaccgtgactgctgtatgtgctgctcattcccctatcttacacgtcaaatattaacattattctagggcgccgtcgagacccagtccgccggcaatggcaacggtgagggcgcacagagcacctcgactgaggccgctgcttccaccgagaccgcctcggtttccaccacccgcacttacactgcatccacccgcgttcccatcacccgcactcctactccttccagcggcttcgctacccgtactcctaccgccagcgcaactgtcaagcctactacttatccctcggccaccagcacccccactggcgagactttcttgtccaacctgcgccgctacttcttctaaacaacactgctgatgtgaagggggtttccacctccacatggcagcgagttgcgagcctatcgatggcctgagagaaagttccgattcccttctactcgcgcagaggcgtgctggtactgtacctattttttgccaagttccggtacaaacggattcaatttcacttcttatttacgctccattttttgccatgtttcttcttttcgacttctattcttgcaatggtcttgtcatgctggattttgcattggcccacgttttctctgcttgttacgttttgcaggcatcttcaattcggactgcggtgccaatctccaacctcatgacatttccttgcgttacatttttactctccaatgtgaaattgacccattcatatgaccggtttccattggactcggaacattttctcacgtatcgttatgatgggtggtgacacgtctgttttatggactggatcttgcctcttttctcttgtgttaatggaaaattcatcttgtttaatctttccacatttcatttgcgaatgatctcatagttctgtttttagtcttcatgtttttctttccacgtggaaggccgatatcggtatccttaggacagaacctgaattgacaaggctttgcctgtttacgaaatgatcactactccctttaataatttggagatcagtagaaatagagtgaggctgttcatcctggagagttagtaaggctggcctgtggatcagtgtcgatcttcttgcgctggcagaaacaacacatagttgacgtcgacatacagtctacggagtaggatcgtgttattcgtccattttagagtattaatgtacgtaaagtaggataatatacaaaattcgaccaccaacttcatcctagaagagctcacggcatcacccgtcgtcaccacccagcttggctccgctcagaatggatactgacatcttctatggcatcgaatccaacgcctcaaccccttccctcgcaatcctctcccgcataatttgccattcaacccacgtcacaccctgcaacaaacaatccgcaagatcatcgagtttccccagatcaacagccgccacctcgtcccccatatcagacaaaggagatccaggcaatggagaaagagatccactcttcaaagcccgagaccccttcccttttcccttcttcgacgcctgcgtctggccctgccatttccgcagatacgcacccgcaacagcatgcagggcaggacactccgatttatccgcgagcacgatcttattatcggtagcagtacccagctttaattccttaagaccgccgtccgagtctgggggagcattagtctgcatcgcagcagaaagccaccgtccaacaagatcaatcttagccttcttcacttctcgcgcattgggtttcttctccttctctttttccccgacttctgatttctcccccgcgtctccctttcctagaactgacgaaccttcaagccaatacctgactacccgcctcggctcaacaccccgaataaccaaatcagcgatatccccgcccctctcctgccgcagcgtatgcagaacagcatataacatgccctccagcacgccaacgcgcagcgtccactcaagcaccgcactcccgccgcccgagcggaagcgctggcgctcaatgagcacgtgagtggggcggtatgcagcgataagtgacgagatgagggtgtacgcatatgcagcgtagacgtctggagcgaaggcgtccttttctttttctttttctttcgtaatagatttggcgatcttgccgggtaggctcttttccgtagcgccagcgccagcgtcacccgaccccggtgttggtgttggtgttggttggatcacaccggtcttagcccccggtacgaggttcagagttgatatctcagaaatcgcgagtcggtgccaggctgtcagctccgggggttggaggtgggttgttgctgcgtcatctggagctagacctgaaaccccggagcctccggagcggggcacgcgcagatgcgcgaatgcgaggttctggatccccatgtcgatgctgaggatgctccatggttgggattgagcgggatttgattttgacgagtcggctgacttggtgttgggatttgtcttgcttgggggcgtttttgggggatctagccgtcgatcaacttgtcgatcttggtttagactggggttggtgttggtgttggcagcactgggactgggccttggaatactagtgataccctctgcaacgccatccacggcagccggcagctgcagctgcacctgtgactgcgactgcgattgtgactgtgaatgcaacgtcaactccgctgcaatgcgctcaatgagaacacccttcgtaccggacgattggatgcccgttgcgcgtgcgatgcgctgcaattgtgctgatttcaagcatgcgagccaagggtgtgttggggagtacagcgctgcagagagacgcatttgggggcttgtttgtgcttgttgcttgctaggggtggcatttggtggggcggggtctgggctcctggtacgaggtgaatctcaaattcctataacggcagttttaggctggatgcatggacatttttgggaaatggattctttgaggtggatgggtgctgatcggtgcacggaccgtcgacgctcacggctaccgtggcactgggtcggattgagtttgatttttgttatttccaaggttctttctgaagtttagttgcgatagagtagactgtcatttcttagatagacctctactatgttgtagtagctgataataacaagtaaaattatatgcgccttctatttcccagacgaaatataacaccgagatcaccttgtgttggtagaacaccaggtgtgaataataaaactccccccataagaagcagtaaatgcgcgctgaaaagccaagtcaaacaaaacacttgcgaagacagcaaggcaataaacaaccgacatcaaaaatcctccaaaagcaaaagtaaagagcaaaaccaagcaagaccaaattatacgaatgctggctgctcaagctcggtcattgcaatctcatctcggagatacaacaacggagcccaaacacgccagtgcagtacacccaaatgagcaagacgtaccccaatacgctcgacatccgactgctgtggcgtcaaagccagcgacgaagtattgttcactgacccagacgcagccacagtcccagtctgaggcacagtagtacccagagtggcagacaccggagcccgctgcgactcacagatcgccaacggcgaaagcggcaagtatcgacgagccgctgctatcgtgctagcaaggatcttgccacgcatgctattttggaagaaaacgaagagctcggactcattcgagagatgccactcgagcgcttcctcgatgggaacgatgacctcgtccgtgacgacggggtcgagctgcagcgcggcacaggcaaagcgggcaatctccagagcaatacagcgcatattttgcgtccagcgctttccgccgcggtggtcgggatcgtcctcgttgttgtctggattgcttgcgatgcggttttccaggtccataccgttttccattagggaccagatgcgcgaccggaaggtggagtaggtttcttctggggtggagaggtaacgcttgtgcttgttgatgtaggactcgaagatgtaccaggcgatgtcgaggttgattagattttggacggttgagcggagctgccagaggcgctcggagtcgaagaggaaggtttcggggaagtcggcgggaggggcgaattggagcagttgggcggagattccgcgaaacagagcttcgaggggtttgagattgctttccgtttctggagttggggttgtattttgggcctccgcatctgcatcgtcttgacgggcttggtcacgcactgatatgtaccagtgccgggcggattcgacctggaagccgccgcgattcattttgccttggaagtattcttggagaaaggggactgtgtcttcgatgaggagaacgcggaatgctcggatttgatgattggcgacgtcctatcaagtcacgaattagttaacgccgcaagaacagagggacttgaatgtgacataccaacttcatagcctctagaatagagaacaatgttcgcagaccgctgacaatctcatggggatcctgcgactctgaacccttttggatttgatcgaccatagaatctgcccactcgtctcgcatcggagcacaatgtgtttttagtagtttcgctagccaccgagccagcgtaagcatgtcgagaacgcctttgcgtatttgctgcatcagcaatggaacttccaggttttgcatgatagttgggtgatcgcgttccggaacaagggtcttgatgacgtcctgcaatgtctcgaacagggcgggcaaacgcggatcgaaggcgtgtcgagtaccatcacttgattcgcttttctcggtggcaccggcagtcgcggcgtggtaagagtaaatagtaatctcggcggccaaggcatcccaataatccgcggcttctttccgcttgcgttggcccttctccccgtccaggtcaggcttgaagtgcaggtcgcggtcgaagttggcgtccatgcggaggttgatgttgctcatgatacagggcagatcaagctcgctaagcgttttcttcgtgactggcggatatctccgagccttacgcaataggcgatgttcacggggatctagtcccaaatcttggggtatactgatagcctccggggacggggatggctctcggggccgagaaacagcggctggtaccggtgaagtagattgttgagccgcatgaggataagcgaagggctgttgacggcgacgaagaggatggatggagggtcggtcgtcatgattgtgagaatctcgcccctcgttcttgtgatactctttagaacgaccatttcccgcaccatacgcctctagagggccttctgcgccctcctcctgggtccgggcttcttttgtgccttgtagatccatagttaagcacgatatatctgaacctccctactcagacagtcagataaaaggaagatttcagggtggcaatggcgagaccacgccatgcacctaaccacagaacaaggcgagtacgcccctatggaactcctacaactcacaaatttaatgggcccctttttgcctcaggcaggcagccaatccgcattcaccgaaaaagtgatgcaagtgagctgtcaattcctgtggagccgaggattgcttggatctgcgtcgatcgcctcgtggttccgatcagggggagaaggtcaaaaaggggtggagattcaaacgtttttaaaacaacaaaagggtacggagtataagaatccgaataagagagaatataatcttccaaaacaaagaggtgtagagtatgaaacggggctccgatagcagcaaaccagggtggggactccagtgtatactctagggcagacaaatgcaaattgtctcgagagagcacaaggatgcaggacaaatggacaaatcaaaggaaaaaagtaaataaagcaaaggagttggcaaagcgaccgggatgaactgatatagcgagtgtatcccagatcgacaaccggattcgggttgacgcaagcagacattcccttctgctgctacccgcgagcagactctcgactacctgggagatctcaactgtcacatctttccatttccgatttgaacttgcatctgcatttgatgttgcttttgggaaaaaaaggggggtactcgcctcactttgaactttgaaaccagtgctggccacgtgagggtgaatctccttttctcggggaaccactggatgcagtcgagttgcgcattaccaggtgcatagtaccctccagcttgccagagaagtactcagagaagggttcacagatcatcgagaagagatgaagcagggcctctggtctggatcggaatgtttttggatgtgaatgccttggtgccttatagactttatgcctgataaacaaggccctatatcccttgagacagccctattctacttctacctcaccacttaacttccaccaattgagcttctcgtttagctcagatctaaataaaattactgtgattcatgaggcatccaatgtttgtagacggatatgagctccgtcaagcacccaagtccactggtcatgtctttggcctcaataacctcgctagcttattgacacccaaatctggctcaacaacggcctgctcaatagctcaataagaaccatgtctgacaagaaataaaataaaaaggaaacatgatttccacgtggaatcttgtctgcatgagcatcctagatctttactaggcagtatcatctcgattatcttcacaaggcgtgcgaagcacggccagtttcaatcatgaatatttccgcactactctacttctttcagatcctatgggcagctcctgggcttgtccgctcgcgaggaatcggttcatacaatacttcacgatttgaagtacatgccttaccaggcgtttcggacctaccatccagctgggctggtcgccttccggttccggggacagaggatggaaatgagatctttttctggctatttcaatcagagcagccggcatacgatgacaatctgatcagtaagtctgattggagggacattcaaaggcgatggttaacaggctggatagtttggttcaatggcggccctggctgctcatccttgataggtctgacgaccggcaatggacccatttccttcgatggcaattcgactcgatttattcgcaatccacactcatggacaaagctaggcaatgtgctttacgttgatcagcccgtcggcactggctactccacggccagcttcccatacccggttaaggacaatgttcgggtaacgacagacttcacgcagtggttgcgtggcttcttcgaatatttcccgcaactgcagtcaaagcagatccatctgatgggggagtcatatgcgggcatctacataccctatttcgcatcggagcttctcgacggcaacaattccctgcctctcaatgtgcgttctatgtctctgggtgatggatcctggggaaatggagcagccatggcggacgttgcaatgggtaaatatatcaggtcacagttgggcttcctccaaatccctgaagatgttctatctgtcttcgacgaagccgataaaacctgcggcttcaacgacgtgctagcaaaatccgccgtataccctcccctgggtaaaatacatatccccggaaacccagaatacttcaacctccgacgtcgagacttgacaaatgccgtcaacgcgacatgcgacatctcacccaaaacccccgaagcagtccacacatcaatcttcaactcaacttgctacggcccctgcgccgtcttctctacagcaagtgattacctgacagccgtattcaccaaccgcaaaattcggggctgcttcgacatctacgacgtttcccacgactgcagtgccatttcagagctcccactaatggcagagtacttcggccgcgcagatgtccaggctgcccttcacgtcgataatagcggactctacaacgcctgcaactccacaattctgggcacgctactatcagtgccctcccccgtgccgccggagtacttcatcctcccgtctctggttactgaccacaatatctcgctccatatctactctggcgagtgggacatgatgatcaaccactttggcgcggaactctcgctacaaaatatgacgtggggtggtgctcagggcttcgcgcagaagccggtcaaacctttctttgcggataatgccgcgccgtcggcgaccaagcagctcctgctccaccacacaccggttgctactacattatcgactgcgaccccgactgctgctgctgcgggtacgtggactatggagcgtggtgtttcgtatcacttattccgtggggctggccatagtgtctttgtgaataagccgcgcgagatgttctcctttgtgagggatgtggttgttgctccgagggctggctgattatagggactggcgcatcttgggttctggagttatcaaaattgggttgtgatatgcattttttagaaaactttttattttcaaaattctagggcacttggacttgtaacgagaacagtaatggatgtcgacagaaatgcataagaaaatcgcgagtgatcgtcgccagtcagtgccaaaaaaaaaaaaaaaagggaccataaattcagctgtcgtatttagtaaccaattccaactacactaggatgagcattgggatcaactacaacatacaaggtcagtactacctaactatctgatgcctctagccccaacggacttctcgtccgccaagcttttcagttgcattccaactctatatagcaatccccatagcccttgcatttcccgaattccatcccactaagcagagccttgacagctgtcatatcgcgagagaaacctgagcccagattcacaataacatgagcaagataccattaggataggaacaagaatgaggaaatgacgtgttaagcatgagtacattactccattactccatggctctaggatcgagtcttgagttttatgaacataatggaaatttaatgtgttgtaacttcaaggggttttctgtagtacatttctgatttcagccacaccacttaagtaggccaatttgggaataaattgataaaggactgtaatatagggcctcccttggatgcgacatagcctccgaacaaaccgatacatcaaaacttgagagttcaagctagaatgctatttgaaggggcgttatcttggctactgcgtattactacatacatgttgctttcattcttgtaagtttgagtgttatcatgctgtagaatgccggtggcttttgttcgatctcgtagcgatcttctaatttaacgactcgatggtaattcttctctatagctaattcgaatatacacaaatagccgatatagaagcagctcattactattgtttatattgatcacatgtcaaacaggtccgatgttcgggtgtttgcgtagaaatagaatgcgatatcctctatacggcgatcatccaatttgatactcttagaaaaaatggtatactcgccccttacagagccgcatactctactctatggtattctccttggtcacaacaaggccctatacagctagggtaagctattgggggtatggttgatagtcgtggaagatcaatttgattcaaggacttgctctgaaaaatctggaaatatttaaggagtagcaaatcccgtagtatcccgcggcgaatcagtttacttacgacatcgaatttgtggcaacagaacaacagaagccatgttgcgaaaactgttcacatccgccctcctctttgctgccctgagcaatggacagacggctcctgacctcgggaccgcggagacttttgctgtcctcggtggctcaactgtgacaaatacgggcccaacaacgatcactggtgacctgggagtctcgcctgggactgctatcacgggttccggtcaaattacgatcattggatccgtacaccaagctgatgcagtcgcaagtcaagcacagaccgatctgacaactgcatataacaatgcggctggccagggaccggccactgcaatcgcgacggaactcggcggccagacattgattggtggtgtatatactagcccaacattcgggcttaccggcaccctcacgcttgacgctcaggggaatccggatgcagtttggatcttccaaatgacatccacccttatcactgccacggactccaatgttgttctggccaatggtgccaacccttgcaatgtcttctggcaggtgggaacctcggcaaccttgggaacaaggacagctttcgtcggaaccatcatggcagatcagtctatcacgttgaatactggcgcaacgatcaacggacgggctttggcccgcattggggcagtgacaatggacaccaatactatcaccaatgcggcttgcgtgacaccacccacaacgagcactactgtgtcgcctacgacaacgacgacgacgacgacgtcgactactacgacaaccaccactaccactaccaccactaccacgccgactactacaacgacaaccaccaccacgccaactactactactacgacaactaccaccaccactactacgccgactaccacaacgacaaccactactacgccgactactacaacgacaaccaccaccacgccgactactacgacgacaactaccaccaccactaccacgccgactaccacaacgacaaccactactacgccgacaactacaacgacaactaccaccaccactaccacgccgactactacaacgacaaccaccaccatgccgactaccacaacgacaaccactactacggcgtctaccacgacaactactggcaccaccaccaccaccaccacaacatcatctaccaccacgtcatcgtcatccaccacgacgacaaccacaacaacgggaaccactacaacaggaaccaccacaacggggaccaccacaacggggaccaccacaacggggaccaccacaacggggaccactacaacggggaccactacaacaggaaccactacaacggggacaaccacaacgaaaactaccaaaacgaagactaccaaaacgtggtctaccaccacgccatccagcacaacgctgtgtactaccactcctaccacaactatatgtaccactacggtatggacaaccacgacgctgacgccatgtacaaccccgacgtcgacaacatgttcaacctcgccgtggacaacctggccaacaagcatgcaaaacccccacaaccaaggctgggaagaacacgacagtaaagactacaaccaaggctgggacaattacgacgacaaaaactacgaccaaggctgggataatgacgacagcaaagactacgaccaagactgggaagactacatccaagccaatacccaaggctggacagacgacgacagcgcgtattaagccgacctttgagaagagtcttctgatgggagattagatgggttcagatttataaattttgggcaattgttcaatgggaatcacccaagatgttgtttcatccaagaaaagtaatacgagggataggcgttgttggcgttagtttacgaaatcaaaccggcgccggaacaggaggtaattgcttaatatgtatcgaatactcatgttttaataatatcttagtccacttgctatccttttcaatcaattgtcaacaagagattctggttcctactacctacgtcatgatctacttccccgcaaaatatggggtaaaccaggtgatctattgtatgaccacaaagtatcagcccacctcggtatccatcacttgccttttctcttctcttctcttttctaaacttccctcctcttctttacatctcacacatctcacatctcccaccatgacaaaaggattcgcaaccatcacccccgaatgcgaggaagtattcgacgaggtcaaaggaaccgacaacttaaactacgtcatctactcagcctctgcacacgacaaaaagatcactgtcgcggagtccggcaaatacaaggactacgccgagttcctctctcacttcaaggataacgctcccctatacgccgtcgtagacttcctttacgactctcccgccggtgatggccagcgaagcaagctagtctttatcacatggtatgtatagacaccctggatcacattaccctgatctttacaatcgtcaaagggtacatggtactaactgttgaattgtatgtagggtgcccgaggccgcaagcattcatgacaaatcttactacacgtccaacaaagatcacctcttctacgccctccaggatatcagtctccatgtcctggcacattcacgggtggatttggaccataatgcaagtatgtatacccgcgaagcattgactccatctagtatgattgtactcgaaactgattttttggtttctcacttagtcctggggaagttcaaggctctctagaggggcctttaattttcttctcgaacctggtaaccgctatgtgaagaacgatccacagatcatgcatggtctggctatgctgccctagatacatatttcgtattataatatttcctatcttcaatcgtctacctctaccacctgtactacctgtactacagtaggaaaagcatagaccgaacataggacttttctaaatgacgggataaacgtcttttaatttcggatttattgtaccaaataccaggttcttccccaggatattaaccccgctgatgcataagaaacagaagcaaaaagcgctctaggtgtggtcaatggtcaaaacagagtcaatgacatgcacgatagattgcttgtacctcgattctttcaaaaaatatcaacccgctaaatcatggataaacagaatgcagatcgagaattggactgccagagcagttatagtgtgacaaggaaccacaagagtaacgttgccggcatgcacggtagattgctcatagtcataatcataagacgccagataaatgagcatggaggtagtcatgacacatagagaaattgagttctctgagacggagtgttaaaatttctcatagtcgcttagcgacggaagaacggggcttgattcgacgagagaagcgaatcagcacgttggaagacatcgccgtcgaagaatctgtcactgtatgcactggccggcgtggacgggacagtggcctgcgcagcggggccgagcgctgcactcagcggagtggcaggtacggtgaccgattgagggggcgacatcgtattgagttggaaagaggggttgttggtgagggcggatgttgagacggatgtttgatggtgctgcaggtgtgaggcctgtagcagagggccgtacaaggcactaggaggggggtggcggtccgggtctgtaagataggcccaaggagatacctcgatcaggcggcctgcttcccggcttgccttttggactgggcgtaggaggatgacgacctcggcaggtaaaagctgcatacctctcaactcacgcatctcgttcaccaggtcgacgaaggactgcatgaatgatttgcatagctgccagaactcgcgttggttgcggagtccgccaccaggttctttgattttcatggtcgatagacgctgtcctagggcatctgaaacttccaggcaaaactggcatcgacggatgaggttgttccagaggatttggattccctctgaatcgcgtgagtgttgagcagcttctagacaccttatgaattgccgacgggccaatggaagtgcaccgtatgcggcatgatatgtagcggtcagctgatggaagatcttttcgaatattcgctcctcttcgttttcatccagtccagtcagtgtgttgaaccggggagctccggaagcaggcataggagggaaagtttcgcctgagcgagggatggccagggaatgtggcacagatgtgttgatcatgtttgatctgctgctcgagcgactgcgtgcgtacgacgttgagaaaccaggagagctaatgctagtctgattagaagtcatagtcatggggtactgggggtgtcgaattgtcgtgtcgcttcgcaatcgtcgtgtgggcgggccaggatctcttgttggagtgaccagcgaaagttgagatcggtctgggacagaggggagtgggttacttgggccaaccaagcgtcttgtagcagagccatgtctgttgatggtctggagcggaactttgagaatagcgcaagcattccgtagctccgccaggctgccaaacatcgtcagcatcagcgatcgtacatagcacggatcgccattggaaactatcttggtgacattgttgcgtagctgcgtgccgacgtgaatgtaggcggcgatgcacgtctcgcattcacgtttaaccgtttcggtgaccgatgacattgactctgggtcattgcacaaagtatctgtcgctttctcaagagcatcgttcagatggtcaacgtgtgaggaagcattgtaaaagacaagctcgagactgtgccgtctggtgtcatcatgcttgatcacgttgatcaatgtatcgatgtgggaatgaacttgagcaagggcaaatagaataacttttgcactcttgattatcggttcatcggatccatgttcacccttgtgttcaggtagactggacatccgattaacccaaccatctcgcggacgccgacgctctctcgggctggtgggacttgggggagtattgtcatttgtggctattggcggtgtaggctgacgcggtcgaagcacagatccatgactgagacctcgtagatggctgtttcgatatgggagcgtttcatctaatgtacctaaatcggtattcttgcgactgattagtcccattcttttgctacgagcaacagatgacccttggattatgccctcgctgttgctccggttgcgctcgttaccaggataaggcgctacgccaggtctttggagaccaggcatatgataagtagcgccttgttgtccagaggccatgcgatagtgtgattttaatggaatcggcggtgcccgagatattgatggagagcgagacgagcttgctgagctatcaccagtgctgggaattactggaaaccgaccacttaaattccgctttgaaggtatcggcgttggtgccggtttagcctcaaaagtaccatcactgcgttaacaccgagtgttagcttatatccaccccaggaccgtaagatggacaaaccctgtatcaggaatgatttctggctcgggtgtactcgtctgttgtcgcgttttcataagaaatctcttgagtttggtcgtggccgcaacttctttctcgttgtcggtcatcccggattgtgtcgtctcattttcggtttcttctagaatttcacgtagtggctttcgtagaggattcccgacgcacttgaaaatttgaagcttatgcatctcggagaggccagctgggaggtcgatgaggcggttttgcatgactgacagaactcgcaatgacttcaatttgctgatctcatttggtaactccttgattttatttcggctcaaatcaagaatttcgagtaatggtagtttgtaaacctaccaagcaggattagcgccatgcaagcataaagcaaacttatcattacatactccttttgggaattcgcggaagttgttcgctctgatattgagatagcgtaggtgtgagcactctgcaaagcgataggggatatggaaaagttgattgttcgacagagatagccttcatagtaatcagtatatagtccagaacagtgataccgtatcctaggaacaggcaaaacaagacttgactataaaagttcaaagcaaggctccaacataccgttcgacctcatctttgatcaagtcaacaactggttcagggatcctagcgatgtgtgaatgaccaaggtcaatggtcagcttaggcttgaccacatctgtgacggcctcgctgcctgccagggaacgcttagtatcttgaataccactttcaacagcacgtcgtgctagatcaatggtttcctccgggctaagtgtttttgacccagtcggttgtttgctagtactctccgaggcatctcctaaagcagttccctcgtcaggatacggagagtcatcgcgtgatgacgccagaaagccagactccggtgttccattttccatttcatcttcgtctgtctcgccgcggttcaagcgctgcccacgtattgcgtcctcgggacgagtcatggtgggtgtcatggccgataaaagcccgaatgttgtcaaaaggcacacctcaagccagcaatttcgttgatgaattgataacctgccaagaactagaagaatatccaggtccagcgaccattcctatacagacacacttcgggcacctgcgcaaagcatcgttggttgtgattaagccggaggggcgggctatctcgacgttggacggggaacgtagctcgaggcggccgttagagtggattcggagcggaggaagagagatccgaatggtcaagtgcccaatgggctgggtaccaagtgttcgaacgcagggcagagttgttcaagaccggcgtaaacggtgcaatgaagccctttgacaatcgcgggcgcgataaagagattggccacgatggagatctggcaggtccaagaatgttgttatcgaagcaacaaacgtctcgagaaggctgacacggatagttaaaataaaatcgagtcttggtcctggaatgaaggaaattggggatattcaagttgggcgaggcaggaaatcttctgattgggcaaacaccggacctccgcaactctgcatccagactccgcctgcgtcactatattgaaattgaaatatcaaggatcatatttagggagagtttaggatctacgatgcatgttactagaacgagaagtgaattgaccaagaatgcatgtgctatcgtgtaaatagagctagggaagtacaacatccagagaatagatcaaataatatacataggccatcaataggaaagactagggatccaaaagcccctggaaaaggaggcatagcataatggcgttcgagcccacaccaacatctcagactcttacagagtgaccgtctctccttcttcgacctcggtctcacttgactcaacagtctctcccagatcaggcgcaccgctaagagctgatttccgctggtcctggaccagagatgtttcccgagcccaggcaacccatttgtcgtactgctcactctccatcttcataccaatttccatgtatgacggtccgaactctgcgccatatgctgcggcctcttccgcagccacccgtcgttgaatatcctcctgcaaccgaagtttgtagaattctcgacgagcaatatcgtaagcagtgctcttgttcatatccgggacgttattcaaaagccacagctgtcgctgaacaacactaataccagagaagtaatacattagcattggggggaagtttcacgtaagaaaaatcaagcattataagctaaaatattgggaacacacctttcaccatctaaccgctttcctggctgttggatgcggctccaatcatagtgttcaaagtccttgccagtgctctcaagaagcacacggggccgggcaagttcccagggatgatcgcggaagaattcagttcgcaaatggtcttcctcatatttgagctcgactggctggaaaagtcgactaggctttttgggctttctgcgcttctcttggacttggaagacgacctgcggcttcgacgacccagggaccgttttcaaccgctgctgaacaagctcatgctgaggaggacgtgtacgaatgagggtttcagcaggagggatctcgccgatcacattgacccattgtggcagtttgctggtctttccactggcgaattggttgagtgctgtctgccgcacccggagggctgtgaggtttattttgcccatggcagtcgggcaccgtcggtagctggaagagcttgaaatagaagaagaattgatagcgactggagacagcaaatcaagagacaagatatgcgctgcaggggacgaggtggttgatgcgggtgcgaaaagatgggattggcaaagcgcgtctccgattggtcgagggatgttctccgccagccagaaagtgcaggccgttcatcttcagaaaaacacacctacgtcttccgaatcttgaccctctccccctttgtctgcttttgcgcccagaaagtagacggctctctcttgtcgagtggcaaagggctctctcttggatgcggcgtacctaatgccacgatgtctgtcatctcatgcctcatccacataggtcccccagctcgccaagcctgcgaattcaccccaagcaggccttggatgagcttcctctctttcgacaaacctcaatgcctccctcgaacattcattctcatgcctcctcggtgcggagactctgtccccgtcgtcctcgcccgtccgtcgcgtcaatagcagatatttttgtcggctcgctgattctggcaagcttctgccacgaacactcgccgaatcgtcgggggttgtccacagtagcctggagggcctcagatcataattttcaaaaatttcagagcaaaggcgccactggtcgcagacagctaccaccccgacgacaaccagagtattcaagctcaaggtttcatctgtcgcaacccaaaagaatgatcagcaacggattggcacgtacgaatgacgataatacagaggagtataatattgagaacgaggaggcagagacagacaacgactatataccattgtggccagcaaagaatgcggacgcggaatcgcaaactcgttgtgaaagatttgattttacatatgatttcgaccgcagaatagagataacagaacaaacaaaaaccgacatcgaccccaaattgccggaaaaatacccccgccaatctttcccgtcatggctgcatcccgagaaggagaaacacctctctacctcggaactgtacgaaaggtccttggcagatcatgactgggaggaagcagtgaatgctgtagcgccatattcacgttacaaaaagacgcacagagatgagtcgcgcgatcaaatggaaatccactcggttgagaagcttgtcagaacgttatgggaagagccaaacccatccacccaatacctgtttcggttatacagagatcttcctgcgccgggcgtagctttactctcgaaacgcacccgcggtgctcttttgcgtttgttcgcacatccgcgagatcgacggtgggtagatgctcgtcgctacttggcattggtggacgacatggtaacagcccgacttcctctatcccgctcactctggtcttctgcgatacatctttctgggcgagccaacggcagagtcctgaaacgagatctcattcgagccgtgggcatgtggcagaagatggaacatgtcgctggagtaaaggctgacgaagtggtcttcaacatcctgttcgacattgcgatcaaagccggtgcattcaaagttgctgatcgcctagaggaggaaatgactgaacggggcctgagcttttcacggtgtggaaagacatccaaaatttattattttgggatgattcgggatgttgaaggtattcgagagacttttgacgactttgtgaaatcgggtgagatcgtcgatacagttgttatgaactgtctcattgcctcttttcttcgagctggcgagacccaaactgcggagcagctttacgcgcgcatgctggagaaacaatcaagcaataataagcgcgtttcgcattctcaaccggacgatggaatccactttcacattggcgggtctaatctgagctatgacatgccccaatatcgggaacgagcccgaaatttgggccgcatattgaagaagtcgtcagcactcaaagagaaatttccggaataccaccgtgctctccaagattctctctccattgcccccgacacgcgaactttttatatcttcctacgacactacgcctacaacactggccagcttgatagcttcatggctgtcatgcatgacatggaaaggacctttgctgtcccaccacgtgctataatctatttgttcctctttgaaggtttcgctattcatggtcggaggaagaagcagtggagtgcggaaaaccttcggctgacatggcatgcatatatccgggctctgcgcgactcgaatgcaagactccgtggactgaatttgaacaaccgaaagatgacgtgggagaacccactggctaagagcgtgacagtcgatgtcgaggagctaccagtgactgatgctcccaacgggttgtacatggcgttgccaacagcgaatgcagttgggaattcacagggatccgaggaaactgccgaaaactctactatggatgactctcaagacaatgaacaagactctaagcctgagctggatgaaaaggacgatgaatccacagaaatagaggaacttgatgtagatgaggtcttcaaccctcgcttgcagttctccggcgaggcagagcaagaggaattctgggaccccgagcagcgtctcgagaatggtctttttattggacgtcggatgatcatcactatcctgcaagcattcggaacatgttgtggccccaaagaggttcttgaggtgtggttgcaacttgagcggctttggcatccacagcagcgcaaatcgattgatgtttttgccgtcaaggaagagcttgataaacagatgtccagggatccacatcgggatcgctgaacaagaaagagaggcagctgaaatgtggatattcagcacttgtacattattttccatatagatctgccatataccgtcccgatttctagcgtgtcttttcgcaaatttattgtttgacatgaagaccatgtccatcttgtagaatttacctacctagtttcctacactgtcatcaagtcttggggcaaaaagcctcggggccaaatcgaatccaattgaagtccaatcccaaaagggaatcaaaaagtcaccacgtgacaccgcgttctaggacgcggctaaagactcaatcttcttcttctactgcacttactaccccttttaactaatctatctctgctatgaagcacaatggatcgtaatccggggcttacgcgccaaatttctaatatgcgatgggtcttgaaacataccttcaaaaagaatgatttccggtaagttgatgaactagggcagaggggtcaatttacttattctaccgcatagtccacttcaacgagaggtggtctcctccgtcatcgaaggacatgatgtcttccttcaagcatgcacttcgtttggaaaaagcatgtgttatcagctgcctgcagtgctcaaagattggggttgtgggttttcagcatatcttattttcaataacgaattagcctgacctcgatatctctagtgactgtcgtcgtttgtccacttctttcactaatggtgagtgtggttttggaacgtttgcaatcaaacagctaattcccacagacagatcaggtgaatacattaaaagctcttgatgtaccagtcgctacgatcaattccaatactactcatgaggagagacaacgagtttatgaggacatgctttgcggccacccgagtacacgcctgctttatgtcacgccggagttgtgccagacagacaacttccgccgccgccttcttatagttcacaagcaaggtcagctcatccgcgttgccattgatgaggcccattgcataagtgaatggggccatgacttccggccagcttacaaagagctgggctggttcagaaggaatcttgtcaatccgactgtcccaataactgcattgacagcgacagcaactccccgagttcgctcggacatgatcaacattctaggattggatcttgaaaccctccggctgttcaatactccgtcggaccgtccaaacattcactacgaggtacgatatctcgctgacttcgctggtgacaacgatagcgcagaagacagccagatacaaaacctgctcggatggcttaagggcatccaaacccgacgagaggcccgacttggcagcgaagcaacacggctccccccaatgtcaggaatcgtatatgtagggacccgagctatggctgaacatcttgccaaccggttatcctattcctcggactatatggtcacggcagtggcataccacgccggcgtggaagccagaaagcgcgcgcacattcaatcaacgtggaagtcttctcagccgttccagccagctggagggggaaggacgccggtcttctctattattgtggcaaccaatgctttcggtatgggaatcgataatccagatgtccgctttgtcgtgcattggacaccaccgcgaagctttgaaagctttgttcaagagtcaggacgtgcaggtcgagacggccgagccgccgcctcactcgtctactacggaattcaagagaggaacttcatagagaacatgatctaccgtgatagtgaatctcaccgtgcgcaggcccctgaaaatcgagatgccaagcttgaaagcttcggcaaggtcattcggtactgtgagagtattaggaggtgtagacatgaactgatcaaagagttctttggtgactttgaattagaagaaatgggatcacaactgccggccagggagggtgtgcctgttacgagctcatccccttgcgacttcgcctgcgatttttgcaaagagggtcgtgccgggttggcaaagcgccgggaaaaaatggcatctgagactcagatggctctcctatacgcggatttcgactgaggaaatcatcgtctatttgattgtgctgcgtggtttagggttttatctttttttttttcttgtcgtctggttctgcttgcatttctgaggcgccaacagcatgaagggtgcagggagggagttcttttatacttcccatatagcacagagacaaagacatggatggaatccagcatccgagctgctcggcaattagtgttcgcttctaaagagtttagccacagcaataaatccactgtcaataagcaagccttttattatgaacacaattatggagtttaccgagtttaccgagtatggaaataggtaaatcaaagggttagacacaaggcaactgctagactttctttagcaaagacaaagagatgagaaagagatcggtgaaaatagatcgctagatcaccctcgtttttgcaaacgaccaggacaggcttttgtgtgccatatgcgagatagattgcgcatggacagcggaaggcacaacgggcacaatactaacccactagaacaggttctagcttaaagaccggggggcgggggaacctgtaattcatgtatcagcattcagaactagcatagttgacattcgagcaacgtaccgcgctgtagctgccacctgcaccaggcggaggcggcggggatcccgagccaggaggtggggcaggggtctcgctggccggagcagtaggcggagcactgccatctgcctgctgctgctgttgggcggcggccatctgctgatagtactggcagtaagcgacgtagttctggtatccaccgtagggagcatatgggtcagtggtgccgtagtactgggcgtactgagcactgtagtcagcggcagtgggggtggcagcagcgctcggggaagcagcagcagcagcctggcctgcagggctagcagagggattattatgctgctggcgattgttgtagccaccgccgtagccaccaccaccaccaccttggtagcgatcaccacgatcaccacgatcaccaccgcggtatccaccgtagttgtgctggggtgggttctccttgaaacgttggtactgttcctttacattggttaggagatcctcgcacagctcctttgcctgctggacatcgttggcatcaggaccacttgaaagactgttagtaggagctcataatataagtgagcgaggcagaaacaagcgggaaataaagtcagtaagagaataatgacaactcacgccacatggaggaacatcggttcgtcgctttcacggccagtgctggattcgatgaagccagagccacgacccttgatctggacacggcaacgagtctgctgttggatgtgcttcacataagcaccgccctgtccaacgacctgagcgcgcaagttgaaaccgggaattggctcaagatcgatgagaatgcgctcatccggccatttgcgctgcgtcaaattagccaaatcattatattaacgaagtcgaaaggaacagtcccatacacggccatactcatcccgctcaacctgctgctcgggctcccggcggcggaaacgtcgctcgtcaaccaggttcggaagttccttttgcatcaggtcattaatcatagtgactgctttctccagaccttccttgttggtgctggtcacatgtaggtaaaggggagggctctagaacggagtaatcagcacttgatctcgcgaatcttaggaagacattccttactgctgcagtcgccatgttcttgtcagggtaatagtttcctcgggttgtcacatcttgagggagagaaaaagtgagtgagaccttctttgcctaaagttcaaaatataaaggaagtcgtaccggcgccggtttcatcttgaatctataagtcacgcagcggaggttagcagatgcaatagagggtgaattggaagctatgaagggtaagcttcatccagtccgaaagaagaaagcagaacgatgagaaagcaatgttcggagtaccccaatcttctaggcggaacatgactggaatatcagcaagtgacaaaggggataattaccatcttctgagtagaccccttcgtcagggtgtagcgattgcgcaggtcattgatctcaatgtccttgatgtagtctccatctgcgacatagatttcggcattcaacttcgctgcgccttcggcggagggtgactgggaattctctgtcgcgttgtcggcctgttcgacgatgttaggaggtgggtagaacgaatcgaagtgggtgtatattcacagaacgaattggagggacatcaacgtgttgaatggcctttttcgcctgaagctgcgcattaatcttggctgctgctgccgctatagagaccacaataattagccaaatgatctcatttataacaatatatgaacctagatgtaacgaacctgcggctgcagccggatccacgacaggtggctttgctggagtatctgcgccagggctgcgactcagagtccgactcagcgggcgactcagcgggctacgagtgcgggccgactccgactgtctgttggacggagatcgagagcgttgatcaaaacgggatcgccggggctcaggctcggtttgatcgaagcgagaacgcttgactcgatgttcatcgtccgccatgacgaaagttggggtaaggtgaaaaggaagaggaagtcgggggaaagaagctcaaaggtgcgcgaaggagtttgggaggcgaaagccaagccaccaacaaacaaggccaccaagacaaaattaaggaagttttgagtagctgataagctcagaatactcagaagagctaataatattatatattcttcatttccaaggactgttggtgttttctagcgaggcatgttgaagattgaaggtcacgtggtgggaatcacgtggttttaatcacgtggttttataaccggcagatgtactacaccgctttaagtctagcttactatgagtcagcgggcggtcgccgagatcggccgattcaaaagaatataccccgggcggatctggagtgaatcatcgcacaactcattcacattacttgaactcctcatggctttcaggcgtcctttgacgctgtccctagggtcagcgtcgctgcagtcatctgctacagctgctgcccgatcccgcgttgctgcgcttcctcgattcacctctattcgtgcgtcgtcaagctcaacttcagctcttgcctacaaggcattgcaccgtcggtcacctctgcctttgccggtctccgatgcctcccctcaatgggatgctccgaccgctgtctcctctattctctatgagactcccatgccgccctcaaacccacctaagcggcacatcctgaactgccttgtgcagaatgagcccggtgtgctgtcccgtgtgtctggtatcttggccgcccgcggcttcaacatcgatagtctagttgtgtgcaacaccgaggttgaggatctctcgcgcatgactatcgtgttgcagggccaggatggtgtcgtcgagcaggctcgccgccagcttgatgacctcgtccccgtctgggctgtgttagactacaccgactccgctcttgtgcagcgtgagcttctcctggctaaggtctctatccttggccccgagttcttcgaggagctgctccagcaccaccgcgagatgaccacctcgccagactctccggaccacaagcacgccagccttgaccacaccgcccagcaataccacccccgtcaccttcccccgagtcaggctctgcgtcacaagcatgagcacttggatgccattacccgcctgactcaccagttcggtggtaagatcctggatattagcaccaacaactgcattgtcgaggtgtaagtatattctctatcctgactcaggctttttgataaaaactgactcattcgacctcctacagctctgccaagccttcccgtatcgactctttccttaagctgatcggccccttcggtattctcgagtccacccggaccggtctaatggcccttccccgctctcctttgggtgagcccagcgaggagatcgagaaggaagctgccgacgttgtcgatgccagcaccctgccccctggctaagctatatcaaatttccacctcaaaacatcacatacccgaattggattggattggtctcttggctttgtgtatcttctatttttctggagttgacctaatttcaaaataaatggctcatccattgtatgtaaaatgacaacaaatattgtttctttcgcattttaatattccttgcttttttcctcaactgcaacttgctacttcgacttattcatcaacatcgtattcccatcttgccatcctagaccggagattacaggtgctcccaatagcctttcgggttatcattaagaaatcatttgtagcaatgtaggttaatggcgtttaatcgggggttctatattggttatagtttctacctgcagtctatagtgataccatgtagcacaagcaaatatatataaacgataaacgatacacgaatccatgtgaaagaagtttcatctaactgcttacaactgatcagatttaggattgtcaggaagccttctagcgtgcatgtttacaatataatgtctgttctgcagttcataatgtcacccatgtactacataggcagataatatataaagcctactatatgctacttgtggcaacgacccaaaacatatggtattacacggttggagaataatatgaaaaaagaaaatgtgaaaggagagaggagggtatcccaaataagaagcaggaggaagtgaagaatagcccatgtcttaggacatatctcaagaaaggatgagacggcgctggaacgagcgcgcaagctcagatagatcagatcttacactgatcgcggcaatttacctgaaatttctttttttcactttttttgcctttcttcactgggtgtccagataggacttgcgaggtattacccgctcagccaagtcctacctggacaagaatataggccttggtcttttacttattggaaccataggagtccttggggcttgtatatgcttctatttctacttttattcttggttttacttggtttgcaccttttgatgtaggctgagacaaaaaaacgccgggcattaattcaatcgagcaaattccctatgcatcaatcatccaaatattataggcacatgggcattgccgatccagcagcaataatcacaaaacaagaccaagcaagaccttcattatacaggtcgcggcagctttacatcatcaacacaacactctcgcggcctagaacctcactctagccgaaattccttttccatgatagaaaatgatatccatgtagttgccaatcagcactccgaccttagcgacagcatccatctccaacgactgaccaagggccttgcgcagggcgtcataaccaaccccacccatatcaagatcaactggcaagcgtgggctcttggagataccaggaggcaccgcaaagggatcacggttattaatccggccgattggctcattttcctcatagaaagccgttgcgtcgattgaggtgattagaacattgctctccgttagaggtgaggaaagggtgaattctgccgtggaggaccagagatagaactatatttatgagtaaataagtgttagtagcaagtttctcctctctggatagggacatggtatgagtagaaggggcatgtaccgttgcatcttggataaaatgaggcttgttgtcatcatcatcgctgcctggggaacccggaatagatatgcgagggataggaacagtgatgttgaggactgataatgcttcgcccaggtttggtagagatggaatcgtgtttcgatagctcttgatggtgattgttgtattcaagcctgagtgaaaaaaaccatcagcataatttaccattttcatacctagaaggacctgacctgatacataggatgaaagcagcgcccgccctgcctcaacgccatctgctccagcttcgtccaacggacaccaaaagaagtcgacgggcacataactgttgttaccaggcccaacagagatattatgagcggtgaggtgggctacaacagtgtcattgtagagtacaagaaggtcaacgaaggggactgtagccgagtaattcgttggatcagtaaagttcgcctgcgcagacaccaacatcgaaaattcagtcgtgtctcctagttgtaatgagacgatgcgtggattgaggtggtcaagtgagttgccgatggaagctatgacatggtcaatggccaaaatattcttgatttgtactaagatcttctaattcatgagaacatactcttcacgggtacctccccttccgcaggaatccctcgcaaggcgaagcggcccaaaccagttgagacctttgtgtctacgctggcagcaacccggagcacgactgtttcgctaccgaacagcattgcttggatgacttctgccaaaagttcatcatctgtgacttctaatggtgcatccttgattgcaaactccacaaggagtgcagaggagccatcttgatcattcaccaatgtggagttggcgtcttgccagtggctgatattcaacacaccgaacttctcttccttgtagtagacatctgcaagggcacgaacttgcgggacttcgatttggaaattcatctcctctggcagagcaataagaaccttcactagagcagacactgtgggttgtgagtctggagaatctggctctgcgaaagggttaggaagggagaaatgtgtatcggacatcgtgaagttcttcacgaggttgtccagcgcatgtcccgtaaatggaagaggcatagtcacgctgcgcagtagattgacaatccaagccggggtactgagtgatggtgcatcagacccacggatgtagatagttgtttcgagaccttgcataaagctcgaaactaaaagatccagaggagaaccctcccgtcctgggcaggtagaggtcaattcatcgggtaatcgttggatgaaaccatcaacgccgactgcggtcatctggccaggctgaacgtctatcgtacttgtcttcgcctcggcaaccagaatataaggatccccgggtgaacagttcggcacaagaatatcaaatccgagggcaggaacagtgagagcgacaggagaatcaatcgaagatgaaagtaagacatccactgccatgccaccactgcttgcatcacgcgcattcagcttgagaatattgatccttggcagaacagggaaatcatgttctgggaagggtcagcttatattgtccagtagtaaaaagaaaaacaaatacactataccttcaatgatgatattgtgtgttaggacttgagttcccaaagcgaacaagcctgacttgagatgcattgtcgccttgcccttaacactaaggcggcccaatcttccctcaatccaatcaagagctatcgcgtggattcctcgaatgtcacccgcctctagatcggtgaggaagtcaacattggtatgacggccgttgcggatgtccactttgatggagggcaatgctgcgtttccaacaagcacattcccatattctgggagataaacttcgacatttgatggacccgtctcaacttccctggctatccatgtcgccagtcgaccaatgcctcgaaccgacttattcttcacgcggcccgagtccatcataaagtcgccctgaatccgggctcgaacgccgtcagatgttgtagaatcgattgatactgcggtcggtttgaagacagcggcttcttgcgcatattctttgacggctgcgggagcagcaaaggcaaataccagtatcgtcaaaacactgattgttagaatagagagagagatgaccgtcggccatggtacacggccccgcttcttgacggcgccaccctcgggcgggttctgtgatgcgaatgacggggatcgcagcgatccttgttcggtcccgtataccaattcatcagcatcacggcggtgcaatagaggtgttgattctgatgataattcatatgatggcctaggctcgtcgacggatgttcgctccgaaggccgtgtaatagggctggactgctcctccaacagacgtgggttcgaatctgccatggtggcctcgtctgaatgagatggtgatatttgcgaaatatgggatgactctgttgataattgatatgatggcctgggctgatcgtcggagcccaactgcttagctggcagaggccggtttgcctcgtcagccatcgtggccctaaacgtatagataaatcacaatgaattgtagtatccggagccaatatcagctatatgaaatggatgaatccagaaccacgtaacagaaagaagagagaggcaagatataaccttggaagaggccctcgatgacgataagccgatgataacggaaccttgggatgcccaggtgtggagagctgacaccttgacacctgacatatcgggccgcaaggcatcaatcccctcgcacatccactctctattaatttattgagtcatggttcttcacttttagggctcccccgttcctattcccttcccacgttccaactcctcatcaataacgcccagctcatcatggctagtggtctcacagctgccgcccgttatggtgcccaaagtgtaaaccaattggccggctccacctcatctttgcgtcgaacactccaggctaatggaatccgacgatttgcccaccagacaccgactttacctcccacctctcctttcgcccctcgtcatcttctctccattgcagacctgacccctacggaattcgcgaccctggtccgcaatgctgcgtcgcacaagcgtgctatcaagtccggggccattcccgaaagcctattgggatctctctccggcaagaccgtggccatgatgttcaacaagcgcagtactcgcactcgtgtatccaccgaagccgccgccgtccagatgggtggccaccccatgttcctcggaaaggatgacatccagcttggtgtcaacgagtcgctatacgatacctccgttgtgatttcctccatggtctcgtgcattgtcgcacgtgtcgccaagcacgaggacgtcgcaggtctggcacaacactccaccgtacctgtgattaatgcactttgcgactccttccaccctctccagatcatcgccgacttcttgaccatccacgagaacttcccggcccacgcgcacaagctctccggcctgggcctggagggtcttaagatcgcttgggttggtgatgcgaacaacgttctgttcgatctggccattggtgctactaagatgggtgtggacgtggctgttgctactcctaagggctacgagatccctgcgcatatgattgacatcatccagcgcgctggtgagggagttgacaaggctggcaagctcactcagaccaatgtccccgaggaagccgtcaagaacgccgacatcctggttacggatacctgggtctccatgggccaggaggaggagtctaagaagcgcatgagggcctttgagggcttccagatcactgctgatttggctaagcgcggtggcgctaaggagggctggaagttcatgcactgcctaccccgtcaccccgaggaagtggatgatgaggtcttctacggcccgcgctctctggtcttccctgaagccgaaaatcggctgtgggcggctattgccgccttggaaggctttgttgtaaacaagggaaaaattgtggagtaaaagccggttaattatggagtccattcaaacatgccgagaagctttacccggccaatgacagacatgatgatttgatatagcggagttgccgatgccgagggttctctgttgccgccgagccaatcaaaagatgatccgacggcctggggatttcggatatggctcctccaaaatagcgggggcttccgattctgagacctgactctattctgttcttcgcagatcatccggaattgactattgtataatatcctacggagtactttgctactagttgccagcgatctgaaatttacagggctatatcaagacattccacctcgggggttgattcatagtactgaatccggcatcactgtaagtgatataaagcagaataccaacggttgaaagcccccaaagctgtatatttccaaaccgattcttgagatttggtaaatacccctggagggtatggactccacatggaactcgggagacctgaagtggaatctcggaatcgttgctcaccccacatttactccacgctccgaagagcatctccaagacgtttgatcgggtaatgcttcgcaggggaagacacattaagcttgcttaagaacctgagtatcgcttatcattcattcctcgaataatacctctgttttcagtacccccaaatttcttccacatctcattatcaacatctcccccacatcacaatgggcttcgaagacaagcgagtcgcaatcgtcggcggcggcctagggggcatgtcctttctcaatgccgcactgtacagcggtctgaagaacgtgcagctatacgagcaagctgcacagttcggtgaggtcggtgccggcgtaaatattacctcgaacgcaaaccgcgttctggatgccttcggtctgcaagagagtatgatgcggaagtcctcccgcaagctgcctagctacatggaataccacaactacaagactggggagtacataggtcacattgctgaattctcgcagccccacgcgcgcctgctacaccgcgcccacctactggactcgctgaaggagcgcgtgcccgagtccagcctgaatctgggtaagcacctggtatccgtcgaccgcaacactgccgccggtgctgcaccgtatacccttcgtttccaggatgacagcaccgccgaggctgatattgtcatcggctgtgatggtatcaagtctaatgtgcgccgggatatgggcctaggagacgaccccaactactctggccaggtggtctatcgtggattcgtcgactacaaggacctacccactgagacggcacagctactgcgcaagactattaacttccgtggacccaagcgccatgtcctgatcttgcctattggtaaccaggagacggggaccgaccgtgctgccatcatcgggtttatgtccgagccgcttgatgcatgggattctgagagctggatgtcccgctcggatattgatagtctccaggagcatgtccgtgactggtgcccagaggtgcagcacatcatcgctggtctgcgcaagagctccgaggacggcaagatgctcaaacaggcgctgtacgtgcgtgacccgatcgaaaaatggtatgagatgaagagtgggcagaaagatgctggtattatcctgcttggtgactcggcgcactcgacccttcctcatcaaggtacgttgcatcctatctgtgtctagtcttattgcggggcatgtattaatagtactcgataggtcaaggaacatgcatggcaatcgaatccggcattgcccttgcaacaattctcagacactggaagacagacgacctagagactgcattcaagttctaccaggacctgcgcaagccccggacagaccgggtcacaaagacaagctacgaagccggcaagttggctagctcagactcccccgaccagatgtccaacaacttcaacccggatgcattgacggagcgcatgaagtggattatggagtacaatgttctagaagacttgaagatcaagggtcagggatatttggacttgcaggattcgcgcctgtaggcggtactgatatatgtcgacatactcctgtgtatgctttttttattttgtagaaacaaataaacctctctgaattttcctacttctgttcgactgcaccaaatgagcattcatcatgccacagttgttaatcgtatgatttgactacacaactcgcaatgttggacgatttctatagatccgtcatacatcggtcattccatctcactcggcttatttacattcaacaccattccaataatatatctcaagatcctatctcttgataacatttctatcctcgggcataataacttcaagacaattgccggggccgaccatcttcacatgtcagccgcacgtgcagcaactccgcatctccatcgtctcgacctcttcacatctgattctgattgtgcttgagctttcgactggaaaacccatgatggaggtaaatactatattctgacctgcacaaaatttgaagtggatatctaacggggcatatatagttcaccactaactcgggaggcttccagtcccgtcgatcatacccatccctccgccatatctctatagcacccttaaccccacgattccctattgatgacgacacagacctaacagactacttcaaccactccgaccatgaaactccagccagcggcagccgcacacccccagcatcatcctatatatctagcgtctcagtcccaagcacgccaccgatcctctcccactcacgcagcaactcgcgaaaccgtcacacgcgcagcaaaagctccacagggagagtagccttaagcgacacgaacctacacagtcgggacctaggctacgccctccaccacattccaaacacgcacaaaaaacagcccagcatctcatactcgcaaggacgacgtcccctcccagacaacacgccgaaccccaaatccgacgcagaatggatactgcgcgccggcattgccctggcctcctcgacccgcgaggaaaaaggccaaagctggctctccaagcgcgagtcctctacaagcctcgtcccagacacggccttggacgaaatactcactaaacgccaccaccaccgcaccaaatcaggcgcctcgtcacacatttcacgctccggcgcctcaaccccaggcggagccggtgctttctcccggcgtacctcccgctcccgcgccggcagcagacccggcagcaacagagtccatctaaccatgaccaccatcccggctacctccccgaccacagcagagaaggaagtgtccttcagctcgggcacgaataccggcacggcgagccccgaagcgcgcggccgtatgcctgccctagttcctgacttcgtggacgcgcgaatccgtgcggagatggcatcgctacggcactgcgagcggtcatacccggacgaagactctgtgtactgggatggggcgggctccgaattcgactcggctttgtcagagtactcgttcgactccgacgagatgccggatgacttcgatgaggcggatctgcagcggctgacgcgcgagcgcgggttcgggctcggcacttggattgaccggttggtcgagtggacgcttttcggggttgatgagtggcctgcggctggtccggctgtggaggctgcttcgcgcattggttcggcggatactactactactgttacattcgaggagcctgttttgatggctgggcgggatgatgatacgatttcgctttgttcggttcgggatgcggatttatcggatgatggggagggttctattggcagtgctgcttctattgagaagcctgggagtcagggggggtgggaggatgctgcgtggttgattcgtttgatgaagagggctttggtataaaatgtgaattgcattgagcgatgttcttgattgggatggttgtctatccataatgtttcgttttgtttagcttgctctttgtaattggttattagctttgttgttcagaatatctatgaagctggctacacatgaccaagcaaaagccctaagatactagagaaatgtcccggttttacatctttctactgatgaacaaaggctccgagaaaattgataggattccaatgaacaagctagcgtgaataaaggccactaaccaacaacatatttagaatcctgcgcgaacaacaggaccagaatgtaagttgcagaatgagttggatggcgagtggcccttttctaatgtatagaataggttcaaatctccgccgacttttccaaagcttaaaagcgcaagaattggagttaatggcccaagacagaagttgccgctctgacacgcatcattggaatatgcgatggacataatggcacaagcaatagagattgagtcaaagccccaaaagtgaaacagacaaagacaacccacaacagcgaaggagaagcaaaagacaaacaatgagacatgaatgaaatgaaaaaaagagaaatgtatgcgacaccagggcgccagtacagatagaaagagagtaacagagttggaatgagtacacaggtggaataattcgagaatccgacagaaaggaaagggggaaggaagggtcttgcgtatacataggaatacgacaagttggcaaagtaagcaagaaagaaatataccgaggcccagttcgttcattaaaagatttgagaacaaacaagctaccacagcattcatcttccaaagtcccagccgaaaaagaagaacaaagaaaatgctgttaggttatccgccttgagtactataacgccatcggaccaggagtctagggtcatgcagcaggtatcgtgatcgtgacatacgtcgaaaattgcgcggtcaaaggggtatggaccgtcggtcaagctcaaatgagagccggcatgaatggggggacgtgaggccgacacgtaagagcggtgtaaatgtaatggtggtctttcgtaaggaaatcggagtggtgtgattcatcaccaaggtccgaccttgactggtgttcccagcccgtaagttccggaaaagagctgatcccgtatagagcccatgtcgccgttggttccgtgggatggtgtgtcaggtccattcatccatcccaagctgagaccgagttcgttgacagctccctgtagctttcctccagaggtttggttgtgcttggccaacttttgatcccaacctccatattgcaattggatgccaccacctctttttgccgcttcccggatgaccaaaatccatgccttgcacatctcgtcataagctgagtctcgttcaatgttgttctgtggcgtgctccagcgaggcaaggcatgaatgatgtcagttgccccatctaggtagctcagggatgtggatgcttgtgattcgtttgggggaaggaagttaggtgtgaagtcactcaaggcgtcaagaaggttggtgagcggctgtcggactcgattgtatgcgtagtccgattcggtgttgccacccaacgggaatgacgactggagggcggcctgatagttccgaaggacttggagagttgaggatacattcggacgtggggatgtgtgcacaacctcatcgacgagttgagggtgacgctcgcacatggtccgtacaacagtccgcaaggcatctgtatcgagggtctctagcagacggggcagagatagaggtcggcctgaaacgttcggtcgggaacgtttgatgttacggtagctgtgaggtagttgtcgaggagtggcggcgggagagtttgtaggcgaagcagacatgcgtccatcatgatcattgtcgtcgtcggctttccgtttacgactggcatacgacgaagagggtgtagacactggccgttctgtcagtacacgaatgcatcaaagaagaaccacctctaaaccggacagagaaaacaaatcattccaaggggaagggatatcttactcatacgggaaggagagaatcgggagttctcgtagaagtgaggaggaacaggaggtgtggccaccaagctgttcatggtgacagccagatggcaaagaataaatgagacggtccaaaggactcggatatccaaaggagtgaaaaagaaacagcaataggcaaccttgaagaagaagaggatatgtaatgggttttgaggtggggagagaagggcagagaaaggtagcggtggagaaaaagtaggccgttgcaggtggcaacgcactccctttgcgcagcttttggagatctgtgcccttgaaagagatttgacgtggactggagaagggcttcgtatatttttgaatgattcttataagaaactaaatgtcttatatcgttctctttgctgtcatcggatgtccactgttttcgggtgctatacgaatacccgcatcatctacatctacgttatacgtaatagaaaaagactaaaaagaaaattgtgggtaatcctattctttggactccagcggtcataaaagggatatcgtttctacaagtacagggactgggcagcaacaatgtcacggcggaccttgcccagggcctcctcgaacttgctctccaggtcctcgctgcccatcaccttggcagcttgcgccatctgccgtaaacactcttccaatcgacggaagacacggatcaagctaccctcataaacatcggtcattttactaggatagttagtatactgctaaaataattgaaagagggggatgcttaccagatatctgcgaaagacttgccctgagtccactcgtagaccacctccatcagctcccagtggaagctctgaacgtactcatcctcgttcacggccatcttagactcctgcgacaccttggcaatgatgcgggcctgtgattggatctccttcagtggcttcgccaactcatcgttgttcatagtaggggcgtccttgaccttttcttcgaacacgaaacaactcatgacggaagcgacttgctcagcagtcaagttgttaaagaaaccattgaacagcaactcgctcagcatcagttcgtcacctgtactaatctcacatgcaacacgagcctttaactgcacgacttcggcttcgttgataaatccaaaacgacggagcacacgcttgcgattcttcagctcatcaagctgcaaaaccgacatggcctctgtaatttccttctttatcgccttcatctttgcagtcagttccacctttgcggcatattgctcgtataattcagtcaaccgaggcgaattgtgcaaaggattactcagaaggcgagactcaagaacctcgattttctgtcatatggttagcaacgtgaatcatgtcttagagcaacaaaatcccctcttacccgcagtagcttcttgaagctttcatccttgatctgcatattctcaatcggatcaagcagcggaataccatctgggaaccgcctcttaacttcatcaatagatttcataacatcattccgagagccaggcgacgtgatatcattgggaagcatgacgcgaatgtgagaaatttccttgatgcagctcagcacaattggcactacctcactgcgagagggttccccttcctttggagggtgaacacccggcggaagatcttggaaagacttggtcccaatggatgacccttccgttattctcaccaagacatcaacgatgtaagattggtgaggactcaatttctcgctgtcattgttcgcttgcttccgcttcttctggttgatcaccacgccccagccgaaatcagcatccttgtactttacatggatcaatcgtccagggtgaatgaaattcaaagaataattggggtgggtaatgacatgctgaacatcgtcggcaaatgcatccagttgtttccgtaggtcgtagtattcgcggatggtcccctcgtctgagatgatcatattggcgcgcttctcctcgagactatgaagctccttctccatacctgaaacacttccagtattctggaactgcttgaagcatcgttcaagcatgtattcgggcgagataccctccacacgcatcaaattgagaatcatgttgtagccaagatggaatgcggaattgagtcgatcctgttcaccacgcacgatctccttggcgactgctgggtccatctcctctccgaccatcatgatcacaatacctcggtcatcgagacctcgacgaccagcccgaccagacatctgaatgaattcagatggggtaacccagcgttggctagttccgtcgaatttgcggacactggtgaagactacagtctttgcaggcatgttgagaccaatggagaaagtctcggttgcaaacaggactttgatgagaccctcctggaacagaatctcaatggtttccttaagaattggcagcaatcctgagtgatggacaccaataccctgttgcaaaagtggaaggatattttggatctgtggcaattgacgatcctctggagacaacatctcgatggcgctttcgaagactttggacaccatatttttttcggaatcatcgttgaaagttagtttgctcatctgtaaagcacctgcttcacactcccgcttgctgaagctgaagacaatgacggggttgtagttcttgagcatgatcatcctgacgatcttgaagatatcagatgggcccttgtttccacccttgttgatttgcttatccttgcccctgcccttgcgtttggctaaagcgtcagccgggtcatctcctttcttgtccgaaatcgcgctcattgctttctggaaattctcctcgcggaaaactcccttttcatccacgatgagatggataccctctccaccagcggggaagaagtaattctggagtggagtcggacgatagttggtgtacacaacgtgacagggctggttatgcatcttcacgatccattcggcaaattgcatggcattcgggatggtggcggacaggaaaacatagcggactttatcgggtaacaaaatgatagtctcttcccaaacaacaccacgattcaggtctcgcatgtagtgaatttcatcaaaaattacccactgaacttcacgcataatctcagaaccacggtacaacatggagcgaagaatctctgtggtcataacaagacatgtggcagtggggttgatggtcacatcaccggtcatcagaccgacatcgccgaactccgcagcgaattcacggtacttctgattgctgagcgccttgatgggactggtgtagataactcgctggttttgtttcaaactttgcgcaatcgcatattctgccaccacggtctttccagcactggtatgagctgataccagcacactctcctcccgctggattgaagaaactgcgacctgctggaaaggatcgagtgtgaagggccatgtctttgcggggttcgccggaggcttatgctgagaaataggcacataagggtagtttggcgggattgcgacttgatggcgcacttgatgagacaccacaagagaagaagtgcctgcagcacctgaaagtcctgcagaggctgtgatttcgcgctcttgctcggtttcgaaagaatcggcgacgattggctcgggttcctgatccaatcgaggtcgcttcgtctcaggttgctctagttcggacggggtcgcagggggctcggcttctgctgagtcaatttccgcagcaggtgcatcggacatcgcaacatcctctttctgttcaggctcggcatctgcagttttcttcacagctccattcacctgtctttttttgttcttatctttcttcaagcgcttgggggcatcctctgacggttttaccgcctgaggttggtcctcaaagacatcaaagagctcatccatctccagcggttgggattggtgaatcaaccacaggaggagaatgagcggcgtaggtaaccggcctggactttttctggttgagaaatttaaaagttccatccatatggggcaagcggtgggggcgatcccgagcaaaagacgctaaacccgattgaatgaagtcaaatcacgtgattagcgatcatcccattccgcacctcgagatgttcccttcggcttcgtccgtacctttccgatcgtctaccctctcctctctgtaactcaaggttagtaccccccaccggaaatacaaccattcctctcgccgacgcttgaatttcagatgtactcctccgctatccgggccagaatggccacctccttcgctgcccgtcgtggcttctccaccactcgcacccagcttgctagcccctaccactacgccgagggtcctcgctccaacatccccttcaacccgctcaccaagtacttcttcttgcgctactggagcttcatgagttagtggtccccaacttacatatgcgcagtgccatgactaactcggacatcatctagttgccggattcggtgctcccttcgccattgccggtgagctataccccctctctacgattctaagccttaagcatactctaacatctctttctactagtctggcaaacctacaagaccaaataaattgccctttgcactgtacttttcttgcgatagcagtctgggcaactaggtggttgaaatcttggatcggggttgaagcagaggcggataccatgtacaaagctagagattattacggaaaattggttccgcctgttaccgaccccattgtaattgtgtagatgtcgaaatgtgtagcttaaaaggacgttgaaatatggatgaagtcattggctgagccgctgtggaaaaccaaaaaaatctcttggtcggcgcgattcatatatcagtactcacgaacacaaccactcgcaaacaacgtgacagttactgtcaacgaagaagaaagctggtctctgaaacttaactttcctcgctattgtttaaattccatacatttactcccttgatcgcttcatggcggggtaaaaaaagaagcataaaaaacttacccgttcctggaagatgcgcaatttaagaagtatccgtctcgctgagacggaaattgagagcgaactgcctctcacagctacagcatgggatactgcttcagactcggtggtgtgcacctttggtccggccgagaacaatgcaatcattgaggttagacgaaaacgccccgagatcacttcaacagatccactgtctcccgaggcttttgagtgtattgcttcctgggatgctccgtgcccgctgccggacctggcatgtgatcgtgtactcgccctgcattactttgcggataacctgacaacctgtctggtgttggaaggaggtgatattatcgttgttcgcgaagagccacttgccggcgaagacaagattgaaatcgtcggctcagtcgatgtgggaatcacggctgcagcatggtcaccagatgaggaaatgctggctctcaccaccagagcccagacgttcttgtatatgaccagagactttgagaatgtggccgatattactttcgcccacagtgacctgcaatcatcacagcatgtgtcagtgggatggggtaaaaaagaaactcagtttcaaggaaagagagccaaagctcttcgagacccaactgtaccggaaaagatcgaccaaggaattttgagtagtcaagatgatggtagcactacaatcagctggcgaggggatggggcgtatgttgctgtgaacagcatcgaagcagatactcgccgtgtgatcagggtgtactcgagagagggcactttggagagtgtgagcgaacctgttgacggtttggaaggcgcattgagctggcggccatctggcagcttgattgctggaattcaacgactcgaaaatcgggtcgatgtggtgttcttcgagaaaaacggactccgccacggcgagttctctcttcgtctgtccgatgaggagatgaaatcatgggcttctcgcatccacctttcttggaatgttgattctactgtacttgctgtcaagttccaggaccgtgtacagttctggacaacgggcaactaccattggtatttgaagcaagagatccctatcactgttgatacaaattcttcgcttccatattctttcgaatggcatcaagagaagacattgcgattggtcgctggctcctcaggtatgctatccttgcatgaagaacagagcaagaataaaagctgatctaaacagtctcgatactggacgcggattatgtgtttgatatcaaccatggatctacctccattccggatgatgttggcgctgttgcagtcatcgacgggagtaagtatccagtcagacctgatttgaaacattactgattcacctattagaaactctcaaattgaccccgttgcgaatggctggagtaccgcctcccatggctcacaacgagctgactttagagtccaaagccattgatgttgcattcagtaaatccggatcccgtattgctgtcctgacgagcaacacactctccgtttatctctggtctctgaagagccgacccgttcctgttcctatcctcgagtcaagctacccgttatcagatgccccagccagtcgaccccggcagattgcattcttgaatgagaatgaggtatatgttctcagggacaatggaccgaactcaagccatatcgagaggacgatgctagacacccgaaccaccgagtctgtatatcaggctgtagactccgagcaactggcatcgatcttcgccggtattggacaccaagctctgtggttctcacatgcccgccaaccagcccatcctgtcagctattcgagtgttgaagaatcttcatcgggaaatcttgatattgcttcatggggtgagagccccaatgttgacagccattgggcccgtgttgtctctatctctgagcatgaggtaagtctatattcgctttttatttggagctttgtgctgatttcgatagcgcgttttgattgcaatgacgagaactggcaccttgtatgctaacaagcgagtccttgcgaggaactgcacgtccttcctcgtgaccccatctcatcttctattcaccacatcggcacatcttctgaagtttgttcatttgaaccacgttgacggtaagattgatttcttggacgtctaagtcttcataagctaacatagggattgcagaaatggaagttcccgaggatacaccagaaaccgatgaacggtgcagaagtattgaacgtggctctcggttggtttcggtgataccgtcgattttcgcagtcgtacttcaagctcctcgagggaacattgagaccatcttccctcgcgctctagtattggctggaatccgtaccttcattgaccagaagaaataccggtctgccttccttgcatgtcgcagtcaaatggtggatctaaacattctccatgattacgctcctgaacaattcatggaaaacatcactctgtttattgatcaagtcaagaagattgagttcattgatgatttcctatcacgcctgtcgtacgtcaatatccagtcttataagaaactattttactaacgttcacatagggaggacgatgtgtcacagacactgtacaaagacacgctgaaaatatccaagaacgtatcggcagctgtcgcccagccggatggaccagcagttccctcggtgcccaaaaatggcaaaaaggagagcaaaatcaacaaaatatgtggtgcattcctagccgctctccaaaaccgtgtagataccaatttgcagaatctgatcacggcgcatgtttgcaaatcaccgcctgacatggaggcaggactgggacttgctgcaggactaagaagtaagtactcggttctttgtccttctcgataatcaagaactaaccatatcacagtacaacatcccgagcaagctgaagatgctattgcgcacatgtgtttcttaaccgatgctcaccggctttactctcacgcattgggtgtatatgatcttgagcttacattgttggttgctcaacaagctcagatggtaagactttcggatgaagtcattggctgtgttattactcaacactaacgaattctcaggatcctcgcgaatacctaccattccttcgtaagctacagcagctcccagagactcgaaggaaatttgagatcgacaatcacctttctcgcttcgaaaaggctttggtgcatttgtatgctctcaatgctcacgatgagatcagcgcatatgtcgtcaagcatgtgttgtataaggaagcccttgagctctacaagtaccaagcagagcaacaacgggaaatcaccgagctctatgccgattatctacaaagtcaatcgaagtacaaagacgcagcagttggtcagtggtttaatcagcgcgacaaaatgacagctagctaattttcaaccccagcgtacgagtctctcgagctttatgaaagtgcttacaagtgcttcaatctggcgcacaaatggcgcgagtcattgtactgcgccatgatggcatctctatccgaggaagatctagctgctcacatcgacggtctggtcacaaccctagttgacgaaaacaaggactacgtcgcggcagcaacaatctacgccgaccatttgcatgacatcgtgacagccgcacgacttctctgcaggggatcgaagttcgccgacgcagcacgtctccttacactacacggtaaacagagcatggttgtcgaaatcgttgactctggcctcgcggaagcaatgggcaacatgaccgacctgcttgccgactgcagatctcagctcaatgcccaggtcccacgactcaacgaactccgtcagcttcgcgctgccgacccgcttgctttctacggtggtgaccccaccggtggagaggcgggcgtcgatatccctgacaacgtctcgctggccccgacagatgcatctacgcttgccggtcgctccatgttcacgcgttacacgggtaacaccgggaaaacaggcaaaactggaatgacacgtcatacctcgaagacccgccggcgcgaggaacgcaagcgtgctcgtggtaagaagggcaccgtttatgaagaggaatatcttgtcaacagtattcgacgactcattgaacgggttaactcgagcgtagcagaagctgagatccttgtcgatgccctgctgcgtcgtggcatgcgtgagcgtgcagctgctgtcgagaaggcattgcaggaagtcttggctatgtgcgcggattgccgggacgaggtatttgaagtccctgcccccaatacagcgaacgaggaccaggaggatgaggataatgatgtcgagcccatcaaccctcctgtttacggaggaggtgccagtgttttgagagaaagtatagccattgttgaggatggcggtgccgctcgcgtcaaggagatccctatcgtcaaagaaatgaagaagtcttctttgctagcttgaagcagttgatgaatatactgcgtgagcctagcatctagattatgaaatgaaaaataaaaatgaaaagttgcttcgattccaataattcgccctacaattatgtatcttgatctacatgttacacttgtatgacttgctagcaactttctacaagatatctcaagagtccctaggctatgtcctgtgagtctacgagacccccataacacaaatagaatacccctccacagcagcctattctcattagaactgggtccgaacattgccttttcacggtgggcgatattgagtcttaatattcactgtgaacattctttcacagcaaattgagcgtggtatacttgaagctatggtcattctagttttgcttttgctttatcaaggtgactgggatattagaagtgaagtatatatctcttggtatgaaaatattttgatctcgagcgtcgaagctatctatacacaggtcatcagcacaaatactcaaaaggttaagtgcaagtctatgttgcacaagtggactatgatcattcacatagtaatatcctgaagcaatcaagccatacactatatcccgttaaggtaaagtagtacaatagacacagctatctcactggatgacacaaaactgacacatatatgttgtgcttctgtgcgttcaaagtatccaggatataaaaaaatgattgtatccctcgtctgaatactaggactgcagccaagaaaggattccaccctaggcaaggcttttcctttccaagaaccgtaagtgaacatttcaaattatctattagctgatattaacctcttaatgtcttgatctagattatgcacctctccatctcagcatatctcactttcctcgtgggcctcagcacgctagcgacggcccaagtggcagccccagcccggtctatcaaatgcgtttgcaacggtatcatcgagaatactcagtctgcctgtgttgagactggtggaagcttcaatgctacagcctgcggctttccgggttgctgtgtttatgccaacgaacaaactacgttcattgagaattgtaggacacttggatatggttttaaacgctgtgatgattgtcgttcttgttgagaatacgggggagatatacgccgggggaaggatagtaagacggacattggacgtataaagttggaagcgaacattccattgatttgcattccagtattgtgtcatgtcgtcatgtgcaatatatattattatggaggaatggaaccagacgtgttgcttcagtataaaccgagaacccactgccatggtattattatgttcgatatcacgagggagaaaataagatatggtgaacggaatatctgcgtcaagcttgcatggccaacttgaagtgcccgcacaagaacctggggtatctttcaagctgacagaccttccactgttagccagaatgagaataccggttgcccggtgtagcttattcaaattttctaaagagtgctgaggatctcgccagtctcgctgacaaggtggtcttcaaccttgacagggccctctccgacgccagtcaagatgacacggctcacaccatccttcagaacttcgacggcgcgagagtcaatctgatccaaggaaacaccagcagtgacattggctagtctctcgtagaatacgccgtcccacccttcagtgttagggcccagaatagccttgacggtgccagccacaacttcagagtccttatcttcatagtagatgacagcatttgggccagcatcgaaagtgtaggcacaaaccgtccggccaacaacacggttgatgtcgtgcacaaggcgaacggcagcacgagatacgtcgttcatgtagaagatagggggccacgagtcgaggcaagtggcgtggaaagtgttcgagtctcgcatggtaatctccgcaaactcgtggaagttgcgggtttgaatagcggtctcaatggcatccatacgcttgggaacaacgttcagtacacgctcagcgaaaagggccgaggtggccacagtggtctgcattccctcggtgctgggcacatccttcttctcggcactgacgaccagaacaagagcccgcatctcaggccagtgggttgccggagcaacttcctcagccaggctgtcgcttccatcggcaagctcacccgtgcgccatgcgacatacccacccatcagagagcggcaagcagacccggagccttggcgcgcaatgcggctcagctcctgaggcgactggggcagttcgtaaaggtcagcgacggcgcggaccaacgctgcgaagccagccgcagagctggccagaccggcagcagtggggaagttgttctcggagacgatccgaagagggtgggcggagagcttggggagcgaggagtcgccatcctcaagggccttgcggagggcacgaaggctggagatacaagcgagtgtccgcttggaagactggatgtcctgcgggctgccgttcaggttcagggtgtccgcaggtgggtattcggcagagcaagaggcagtggtcaaggtacggagagagcgctgagaaagtgtaacagagagggaggagtttgtggggaggttaagaatagtatcacgcttgccccagtatctagaatacttctgttaaaacagaactatttggtataaatgagatgaggggtaatcagcggcatacttgatgacagcaatgtttaccggagcggtagtagtggcccggtaaacagtctggtttgatgtaacagtctggtttgatgtagacgccatttttgctttgaatgaatagaagaacaaatttctaaagaactataggagacacgaggggagatttacttcttagggggattgttgatttggctgggcggtgagggggcaaaataatttctacggcgtagttctagttccgcggatgcgccgttcgtcctccagtcattgacctccaattagtattcaacaatgggagctgcagcaagtacgccctccgcaccttcagtggagccaccagcagcaacttgtcctgtggaccacaagactcgtgagatttggttgcaacaaaatagcaactcacctcatcctacttccggtgtccctgccgaacagggacaaccacgtgccaaagcacaacgacccctatcaacagaccgcgaagtgagcactatccctagagctggtgatttcagctcagcaagtgcttgccccgaggccaataagggttctccatccccatacgccgcgtcgcatggtagcccgtccaatgccgaatccgagactggccgcgatgaagctactggaaattggatctatccgtcggaaaaacagtttttcgaggccttgatgcgcaagggtaacactcctggatccactgcctcggcctcagagctcgcgacttccgtagcctccattatccccattcataatgccgtcaatgaacgcgcgtgggatcaaatcctcgaatgggagaaaaggggcccctcggctgaccctgggagcaagaaatgcggaggcccaaaattatattctttccggggacttggagtcgatccacagtacctgagcccgcgtgcgcgaatcaacggatggcttggctaccagcacccatttgaccgacatgactgggttgtggagcgttgtggtggtgaaaagatcgaatatgttatcgatttctaccagggcaagccatcggaaggcaatgcaaccccatcaggtctggctgccaatgccaaacccgggaagctcagtttcttcctcgacgttcggcccaaactgaacacttacgaaggttggaggttgaggttcaaccgcttcacaggtctatgaaggcatcattgatggtcgtcttctggcggaatatgctttcgcactgcacatacaaaggcgacaacggagcacgggcagtatttgggacccaattgggtatattttgcatgtacaacacatatcattctgtacgatatcaggctacaggattaagggacagtgatgaattaatgttctccattccaatacacatcggattggcaaggaatgcgcaaatcagaaataagagaatgaaatgaagcgaaaaggtgagatgattgactaacggaaatgcaatcatgcaagagggatatcgtgcgcatacatgacaacattaaagacgaaaaccgtgatggtagccaataaacaagaacgaggaaaataagagagatctatccgaggacaattgcaagcacaataatagcaaggataacagcaagaatcacaaagagacagcaggctctgttgcgcgcattcttctgatatctgctagcactgcgcaattcgacattggcgcctcgtgtgtcctgggtgacattttggacattctcgctgatgatatccaactgccctccttgttccgtaacgatgtgcgcaacatcacggaagagctcgttcagctctcccacactttgttcgatgttccggatctctgcctcacgctcgatgatcaaggactcttggaagtccacctcgccctgattcgccatacggtgttgctcctccaatagctgctcttgtaattggacatcgttgtcggcagacggttgctcgcctccttcgatagctgtacgggcagcaactgcagaagcgcgctgtttctcgagtgcacgacgctgaatagtttggaactcatccaaggtggccttgaattcggacgatagcttctgctgtgtccatttctgggagggctataagttgggacgttaataagaaattctcgctagtggataaaatcagatggatcatacattgacgtcctcccatgtctggacctgtttaatcccttctcctacatccctaaacccggtgcgggtctcttcaagcagattatgaactcgctcgcgcacacgctctgtatcgcgtttggttccaagaagggcaatctggttggataggcgagagatgttcgatgtcaaggtaaatagctgatctgagagctgctcggccagatggtcgaagtccggatcgtcacggtattgcgggtcttcagccctgcgcatggtggtaggctgagcctccaacgagtttagcctgtcaaaagacattctatatgtagtggaaaagcaattaatgtgtgcttaaagtgaaggtagaagaagactcgataccagatgagttatctgcagttccctgctgcctttgataagccgcgttggtgcgcagaccgccctcacatgacgtactatgcaactactaggctcgatatagactagctcctgggacaatgcactttgcgccacatatcacatgatgagacgtggctggtgtgttttgatgcctcaaaatattcctaggtggacctcgccgttgattctgtccgaccagctcaacacaatcagctgtcagccgtggctattcgtcaacaccgtcactagcccgccaattccgttctccagctcccggagctcgccatatgaccgacattctgatcatgctctaatcttcaacaatctcattctcttccacgagcgcatcccactcccaagctgacatcatggctgttgttcaaactcggccgtacaggcgaattttgacttcggccttgcaccgaagatttgtccatgcatctgcactttcacttctggtctcttatatcatcgcaattgcgatcggagagaaatcgtcctgtgagtacatcgcaaccttattgggtcgagcctcgaaggctcagcttcaagtcctgaaagtacaaagaactgataaaactatcctatgcagttttctggctatggtttccctttggtggttgcggtgttcgaactgtgctacttttcatatcttcgctcaccatttttgttctccgcgtcagtcaaatgcacatcggctcgagaacagctagctcctcgttcggcaccttgacatccttcactctgttacaaatcgcgcaaaccttcggctggtacatcttttcggcatggtggttcactctgatttatgtatggtcgtcttcgagtgattccaacctcgagcttgtgaaacggggcaggtgcgttgaaaatccttcaaatgactgcgatcgggactaatgagatacaggccacacgagcgaccgaccctgaacgaaaggccgatttaccttcattccttccatatgtttctagcatgcgtgcaagcagtgttccacctctactacgactacgaccgcattgcattgcccatcgcggagcaaagctccagaacaaatgacgagcgtacccatccagtaccgccaacctccaagtttctacagggtactctgctgcgagaattggcagccggggctctcagaagcgttactgttgctacagcgtctctcgtggtataccccatatttttcagaagctttgcttggagctggtctttgtactttgccaagctcttttggagcttcccgagatctgcagccgagcctcaaagcttcattccctcgattttcccctacttcttctttggaaccttggtccccggagtgttgcttgtcctctcctggcaaaccgccaacctcttctattctgtgttcatcggcaaggagcctttgaagcggggccagccactcacaacagaagccaaggatcccaatggcagtcttcttagtggcctcaaggcgaagaaggaagttgtcaagactttcgcgctctgggagctcagtctcattagccagcgcgttccggaccgccgaaaggcaattttcaatgaaattgatcgcgagggtggttcgacttggtcccaagttcttgcttgcactaccaatgtaatcaaggccatcaacactcgcatcgaggaaagcaaaaatcccgcgcctgttaccaagcccttgccgcaagccgagagatccgagcctattcttcaaactctcccgcgactttcggaaccgatcaaagatgaccacatctttactactgccccgaaggctacttcacgtcaggacaaatttggcgatgcatttagctcggcggctaaatcaatcggtcagtcagaagactggactccaactgcgcgagcccgagttcgtgatgttttcgaccgggcatcatcagcaatgcttagccctgagcaaaaacagaaatatctcgcctctgcgcagaagttcaagctacttaccggcggtccctccacaactcataaacccgaggacatgaatccaattctggcacagattcttcgttcgcctatcggccaacctttccgtcaaacatacgctcaacgcctctctgctattgttcttggcacaccagagtcctctttatccttgattgtggatgccgtagagtccttgactcgactcctcgttgccagcttggccgaagatccatatggcaaagctcaggccgatgtacccttagccgtgcgacttttgacccaaactactctcaccctggatgcatttgcccaccagggtggattgcatgcgcactggaccgatatcaatttcccgccatcgagcgatccccaggcgcaagcagttgcccgtttagttccagatgttgaaatcgtgcttgctacacttcgtggtggtctcaaggatctactgacggccttcagaccttacttgcgggatatcggtatcgcaggcaaggatttgaggctcgcaaaggaggcagctggcatcgacggggaggcggtgttatgatctatgtctcttttctgccgcaattttttaatgctatatctcatgatttctcttcacaaaacttcatgtattgctatttctcgtcctgccctctagtcctatctagattgatatcagtggacaaatgcatggttaggcgttttgttaagatgggcgtggtgggtgttggttgaaatgcaatatcagcttcagtgaatcaatacaagctttcccatatttccatcaatgagatcttcttgaattccaattaatttgtaaagagatccctgtcggcgagctgagataccactctgcaagagccttgaacgccatcgaagtttcctcggggaaattgtacagcttagtagtacgtaggacgagggcttggtcgttgaaataggactcaaaagcgcgggcacgtttgcccctgaatgagattagaaagattcatagagtacggtaagcgactattcaagcgactataggaagcagaaaggaaaattaagaattaccggtaccttcctatgctaaagaaggtttaccttccatagctggcctagaattaagcagagaaatggtaagagctccccacgaaaaattatcccatccgtcatgtcagtatcgttgtatataaaggctttagtgtatgaaatgtttcccacgaatattcgtcagcctggaagttccaaatcgaggcttatcatccgatgaaaattcttttgaggtttgtaatagctaacacttcccatgctattagacgttatgatctattggagtgagtggtcgtctcactcttttgaggtccacggaggatatacactcgtcgggaacatatgacgacaaggggcctgctactttacggacctgtcgacatggtccttgaaataagtatcctcaaatgccaaagttgagcggacttcatcaataacatcctctagctccaacaggactctgcggtccctgtaatcgtgattcagcagctatgttgataagacatgagatgggatggatggtgtagatagagggagttaggaaatttaaatttagcaccataagcgccttttatctcactagctctatttctatgaagcatatatataaccatgaaagaaatgatgatctagagagtaatgtggggaagaatgtctatggaagtatggatcacatgacattgatttctcaatcaacactaacctcatcaagtccatctacacttgttcaacacaactccaagcagcaacagaagctctaaaaaactggtagcttagagaaaccatttttctttaaaattatgtcattgacaaacgtctaccatgtgcgtcgagtcgcggatacctctgcaaaagcgtgtttgatttgttacaaaccatcaaccagtgtgatgatcacaccggacaacaaggtatgaaatccgctctcaaacctttaatttggtgtacactattgtttcttcacctaatatcccatttttatacatgcgaagtggctaattcacctaggacttcttctacgtctgccccgcacatttgcaagacaagaatttctgctctccaatcgtcgacacagaaggccaagcaaagcgcctcaaggaagaggaaatggccaaggagatcgaaaaaataaagaaagaatatgaagaaaaacaacgacgcaagaaagagcgtgagaaggcctctaacaaggataataaagaggaaaaagacaagggcaaagataagcccaaagatgaagataaagctgcatctgattcaaatgcaaaagatgaaaaagacagagatgataaggttcgtgtctttccgcagcaaaggaaatcaagcatatacttcatatgaacgtgtttgctgattctccctgccagatcgcttctatccagaaaggctctgggacagagacaaagtcagatgattcgcctcgaatcttctccttgcacaagtatgtggtgatatcgtgctcatgatagtaactctaacggcgaaacaggaatttctatcagatgcgcatcgaccggctgcgcagcattgaaatgacgaaacgcaaccaggaaagattaaggcaaccttcactgtttccgtctgtaccgtcgggaaatccttagatacattcgctcatatacttggggagtcagtatgggtagttcgagatacaaacgctagattggttcgcccatcatcctttgccgatctggcaggcacagtgaagatctatgcgaggggaaggtgatacaaaacaaaggcatgtctggctattaatttaatatctatgactttgcgcagcatttttgatactcccattagtcactgattatcgaaccattttactctgttttgacagggttgcggaaaagaacagacgcaaccgtactgaaatatcataggagttttatttccacatctatacatcttctattccttaggacttaacacaattatccgcgtgtcatatagtcctctggcaaaaagaaagctcaaagtcatagacgtggtattggccccggcacggggcagacacatacagccctagaactcatacaatgggcctccatttacaaacggaattctgatcctgcaggatgccgattgcagtagtgaaacctccaagctggtgacccgctcattcttagcacacatttttctacgaggcgtccaacgagactacgttttttaaatgaatatccagccactctggggaaatgcatatgccagatcggacattgaatttctatttcctgccataaatggcttggtgtcacgatgctctttccgtattgcatgacctggaggtgtgggtacaataagcactagtcaactagagtggtccacaaacccatcataggaactgcatcagccctagtgggcagcgtactcggtttgttcctgtgcgtttcgatagaaccattatttgtatatctgctgcggccttaagttcgtatacgtgatgttggaatgaactcttcgtgtctgtagactgccatggtacatataccgatatttgtactctcgcctccgcgtcgagacttgctccaactcactctttgtagtctagagctcagctgtgcactcgcacctactagttcgaactgtcgtctctataattgttacgtttctcgccttagctactaattaataattacatgctagttatgccgtcgtttgtgttaatgtactatgccatctcaatgcgagtccttatacggagtacatagcccgcaacatagacaactatacccacaacacttcaagaccgagacagacgcgtgagattcaactccatttaataatacagctgcctggaaaggacaatatagaattattgaagaagcgtgtctcaaatttgccgattgaatgctgcctggcaggatgaatagtgctttactagaccacgcggccaactaaactagcgccattcatataggaggcttatagaaagtgctgagataaaatgaccaacttaggtagacacgattatacctcgtatacctcgtatagattactccatagtatattggccgacactcttactcatgtgagtatagtagttagtagttaaatggtatagaagtgctttatttagctaaagtacccggcagcctataattaactagttatccagtagccgactaattcaagatgtcgatgagacactaggcttttcaatcaatagatgcgcagatatcatacaacgaagtaagactgttgtagtcatagttactgttttgaacggcaagctcttataatatagattatccagatataaataagccactatactcctatcatccattaatcccagacagacctgaaacaaagttaaatgccagcgctaaaaccgcatctattgataaactatgtaacaatgatgcgagtcttggaaatggtatctgtgcatttaataagccaagccagaccggatgggaactccactccaccgggagctccccctgcaaggcaatgtgcactgcccacccccacagggaaagggttgccaatcacggtatagatttggcaagtatgtgccgtctagttagcctgtagtgcgtaggggcaccaatgagaggtggcagactaattagatctacgattagcaagaactacacgactaatgtatgctattagcgatgtatatagtactaaaacccccaattagaagacaatataaggtcttcgttgaaagatacaagatacaataaccaatacataccagacagatacccgtaataccaatacacataccgacaaccaatcgggaaacccaggaaacagacccgctttgcacagcctccttctgcctcaaaccttggaagtcgaaggggggggaaatgaatcggtcaatcccagcgtcattggcgttacgctgatccttaaaacattcctcaaactgacagcgcttcggtgagtggggccactttaggaagaaacatcgaagtaaagaaactctggagcgaaaaagaggaagaagaagataagtggagtatgcgtttgcgtggatctacccttttgtgggcttggtgagaaactcagggttgtgcttggcgcgcgattaactaccatttttgtcttggctgggcgtggctcgactcgccgggaataataaacacgagtcgagactttggcacgttggtatgcggcgcagccctagggtaggttgggtaagccggtcccgacttcaattggttaccatgtacgattcgaaatagggctttgggtctgtctcatatcgccgatgctgtattactctctatctttgagtttgtgcaagatgcaggttttgatttgtgggacatggctcctaaccaacgggggtggtgaatacggatcaaagatggatggataggtacatgggctaggtacatggtggcttgaggcggacatggctcgtatgtttgagatggattgatatcataagtgctgtacagatcagcaggggcatgtccgctggcgtgccacctaattcttgctttgtagatcgctggatggagcacggagggatctcttgtcggattcagcggcttgtctagaaaggtcgcagtgtgctcgagcctcactatgccattgtcgctgcctgtgagtagaatggaatgagaccaggcagtcatgttcttatcgccagcgacaatgttcactctccacgtgggtaggaggtgttcccaaagagtaggtgcctcaattatgacccagctggcaagaaatgatggcttccaagggtccctcaggtccgagctcagatgtaccacatgtcactgacgacaaggcgcgtgagcgcccatggttggcacacgatcatctagaaccggacaaaacccataaatgagccataaacaaatgtaagttggagctgtaagctttcataactcgtaaaactatgtatgcatgtatggtgttcatcattcatctcaaagattgccacgcccagagtcattagctggcagggcccgcattcccggaggaagacggatggcagggttagcgcgagccatgttgacctggtatgcgatatcgacgcgggccttggtcagaccgatggctggcacgacccaaccaccacagctgcatcgaagaccctgccatgcaaacttgccgacattagacccgcagacaggattagggcaagtgagacgcccggagaggggggcatcgtcaggatgagcgccgtatgttgtatccgcgccagcatcagctccgacctcagatgggaagagactgggacgcatccaggtcagggggtggaggaagacatgcccgcaatcggcagttgctgaggacttggcagtgtttttcttctcttcttcatgcgggatgatgaatggagtcgttgccaatttggttctgtgatgggtttagtttttctgaatatgggtttagatcttcaactgtggaactaacctgcattttcgacatttaatctcgaccgttcgaccggtagggtcttgggattgaacgggctgttcatcttcaaatcgcacagacttcaactctggggcacggccacacgctacacttccttcgacatcgcggcgataaagccagcgcttatacgatgggtggtcggtgacctcatctgggcagcccatctcatggtacaaattcagctgttccatgaagccatcgtttggctcgcataggggcctgctttggcggatcagcgtaagggcagtttgcggtgtgagtgctgccggctgccggtggagcaggtaggcgatgcaaatggccgcggagcgggacttccccatcgcactagatcatattagccagtgtacatctttctatgataagcaagactaggggcaaggcttgtgggcttccagtaaaagggtcgggccaacgcgcatcagaaccttttacgggattcttcagccacgtgtagatcgcacttagatcgcacttgatcggatacgcaatgacgtaggaggcacaaagccactcgagaatagcattccgcaagaggaataggaacgactgaagagccgggacagactttccgccagtaaaactgaaaattttgcgttttgacttaccagtgcacgagtacacctccaccaccgtctaggccggactgaataaacttgatagcggcggggatttgttccaataaattttcatcgtcgacatcgtcaagtcctatggaaagatgctggtaagacttgaacgtctccatttcctcagctgggttgagacgcagcaccgagagaacatgcgagatatctgcacgtgccaatgctgctttgtttttggcgcttaatatgctacaatggcgcgttagcaatgaataaagaccgcaaattaggaactgccaattccatctccagcctcagctccattttagaaacatctgggcaaggattgtctgttagcgaagtgagaccaaccctccgacatagatattgtggccttttatttgattcatggccattttgagatatggtggctgcacgttgacagcagcagtatgttctgttgatggcgacagaaaaatacagaatttagaagctcagctccagtgccagtttgataacttgactctttttttcgtcctagatcgcaaaggcggaggttgagcctcggcgctgccaaactcaaaaagtctgatagggcaagggtatgacaaagcaggtgactttgatgcctcaggcaaatatattgattttccgattttccgatctagtatagttgtcagttgatttgaactccatttattagtcctcgaagatgcacgagtacaacataagtacagctggaagagagtgtggatttgtatacagcgtggcactttggtggtcatccactatgaggatctcccccactctacggagtagggctgtcctaattaagtaaattaagtacaggattacagtgtctacgttgtagttccaggtgtttcgtgcacagatagattaaattacaaagaagtctagccgagcgttttccgagcgtcatttacatccaacaaaggtcaaacaattgacgtccttagctgatgatatgattcgctacgcgagctgcaaggggggggggtgctcacggggcaacaaaaaaggaagctagatttaggcttagttaggcttaccgcggggaacttggacctaaactgatcaggaatggagccataaacggggacgaagccatatacggcctcgctactccgtactccatacggagtatataaaaacggctagcttgtcccgcatcacattgactagaggcgtgacacgcgcttctaggctgcagccctctaaggcttaagctgcctgcgcctcaggaggtacggagtacaatgcagcaatacacgggctcttgcagggcttggtttttgctgacggcctgggcaaagactgggcatgtcagccgaaggcggccgaactaaggagtacaaaatccgtcaacccctccctgctgacggactaagtgttattgctgcctgtcactgaaaaatgcggaaacgcctcgatgcagttgtgtagcctacctagtcagccgtcatccgtactaagttaacgcctcctagaatatcaactagcttgacgatgacgatcgatggaaaatacatacatacatactggagcctgaaacttattaaactggtctttggtacgaagtacaacatacagaggatgaatcactgtagagaggtattaacctcccgccaagagattcactaccaagcaattataaaaccctgatgtcgagctacctaacggagaaagcctgcctgttggaagaaaatcattactgcgtacagactaagatgcttgatcagaagatccgatcgtcatacgcgtgataaggctccaggggtatacatataaatctcccacccgattatagtccacacatatattgtatcaatgtagactagaactgaagtctaagtacaaggatggattgcggtatgaaatatacaccatttccatttagcgatatttcccaaagaagaaacccaaaaagagatttcgttctcgaagctgatgtggagcaggaatccgcttactcagccctgccccctgcagccctggagggtttgttccaacgttcttatttctcttctccccttcatcgccaaaacctaggccattttcagtgatttttccaaccgaattgcatgcagcatgtcttgctcgatggatatttgatcataccacaagcgtcaaggttcacacccccctacgcccaaatgacaggcggaccggcagtgtggcagtgcatgcaatgccaggcgccaagtggggggcgctagtaaatcagtgggtcgaaatgtccaacgactgcatcgtccgctttttttatgtggaggcaaaagaatgttccctaatgaatgtagggcccccgaatcctccgaacgcacaagatctcgtgtatactcatcgtaccacgagttgcacatgtatcgtacaatgtacacgtacttgcgcggcagttcaggatcaaataaccccgattaaccgggggtgttgtcgcatgcgccccttggctgggagatattaagcctaaatgccaagagttccaagccctggtgtgttctcactggttgccaagctgcacaagaccgtgccaatctatacttcattctcccaaggactcggcgggattgcggtacccctctctatgaacaagtttcgattctagaaaagcataaaccatggttcctaggtgtttctgtcgttgtcggggctgggttggtctcaccgaaggacctttcaccttggcgtagggctaataaaatacaaattttgtgttttttggcatgagacttggtagaaggtgagattaaagaacgttatatacatcatccgctgggtcgcattgcgaggcgtccaatatacgagaaacccccacctatccgcacggccattcggcaatgttctggttggcttccatgatcccgtcaaataatgtgaagactccatatggggtaggatagtgcgtcacatagatcagcaggaactgttggaacttggaacttctgggccagtctattgattcccggttatggactggaccatatattggagctatagaagtgtatcggatatctacaacatacgtaaagcaaaattacatgtgttaacgctaagccttgtgccctaagaactgttgtcattccaacgtggcttcccacgcaagatccaatgagataattgtcaataatctaatgtttaattcgacctgaatacccataactaccatctataccccgtagaagcaatccattggaaaatacacaacgtccgtaatggtatgtaacagccatgacccatatatcctcgatacatacatatacgccctttccacgtcacccaaagggcagccctggccctgcctggcctgcctggcctggcttgggatgtttcgattctttttctttttcttttttcttttctttttcgcctcttcgtctttgattagttgaaaccttcaaatcttcatttttcccttctcccttgaggatgagatcacctcaacttgcccccctctctttgcctgaattggatccaatcgcttgcaccgcccgaattcctacccgatacgatctgggcgcatttcaattctcaccttttctctttttgatttgacctttggttttgatcttcagctccagcgccagccggcctttccttttgcccttttatttatttgggcttcagctagtggggttgccatacttagagtgtgtgtatttctttatactcaaataccggggctccatggcaccattctaacatgccctagttctagctgtgctattcttttctattccccattaaacatgtgtgcatctccccattgagttacagtgtggccaatttctatgggacacagacccggttctccgtgtgtcacttgcgggaaaacgtttcatcttatgaggcgaatcgccgaacaagggtcccgaggtaggtcttcttcagccctattcttcctactttcctaccccggtcttttattatcacgtcaagcccactttcaaatcatctgacgctcaaaatagactcacaagacttttatcacctgcatgaagtcctctaacattgtcctataactactcttcgactcaagtaggcagaagctggaccttctgagaaactccttctcggagtgtgaggctggtgaacggcccgcttaacaatctgaactggtttcacgaccgacatttgcactcaactggattgggttattgctgggataattgagatcttgattcgacctgcttgttccgatttatatcaagctcgactcttctgctttactgggtttctcagctggatgcgtgcccatcttgatctcgattccggctctatgttctgcgtctagaatggaccttcgattttctcagtcgagcttctatgatttcagacagcacagacgccattccgaaagatcccaatacgctatgcccgagctgaccgtatcatctcacggcccgttacctatagccccacgaaatagagctactatgaaacctgcgcctccgccacttccgcccccatccagaatccccgctttggagatgggccatgaccccggctggcagtacgcaaattctcaaactccgacttctctaccgtctatcaacccgggctcaagtctgttcggaggtcatcgacggccggtaaccgcctcacagggtgatccaatgcagatagacgagttagaggggaggcagggagctccactctcgcggagtcctgaaactcagatccagatccagccaccgccgtcagctacagacggatttccaaattccatgtcgatcatcccgaatccgacaggtccagtgtaagcgcacttaatgcgcgaggagtgcgaacaacttggtttcgcagtaccgcgcttttctatatctgattgctaacacattgatagtttgagtggcgagcgcgaattttcactgcgtagtgtcaaagactcatcaaatgcctacgatcaacatctattatccaaaattggaaagcctcaaatagcaaaacctccgtcccccgggggatctatcagtcttggagacagccgaaattcgctctctgcacttacagttccttcacgaagcccaagcaatctgccatcacccgggccttcagaagggtcaacgctggatgtgaaatggcacaatagccctcagtctgggggcgtttccccaaggacaaatgtcaactggagagagtatgtcgaaggccgaagcccaagcgtggagagcaatgcaccatcagcactggattacgaccaaggatctttccgacgccgctatcgtggaacaacgccccagcgagaagatagcatcagtctaccgagccgatcgaaccgtggaagctatgaccaggacgttttttcagatatcgagggagagttttcggccgatgagccggcacccccacgacaattcattcttcgagagcccacaccgccgtatccggattctagacagggcatgaaacgacgggcatcctcacctccacgtgagccgataagcgacgatagacataccttgcacatcgcgacgagtaacggagacttgtctcagcgaagactcagtggtcatccgttcactaacacactatcggtcaaccccaactatcccgcgagtcaacgaaccctctcaaccggctcgtccttgagcatccggacctcgggctcgtattcgtctacgttgtctattggaggtagcagtatgaccagcctttctccgtacgatcggccgcctccaggtggtttttcaccaagctccgacctcgatactttccacgagaaatcaatcctcaaccccagtcctcctgcggcgctatctcacgctacccttccaagattcccagggcctgcgtcgttagaaccgcctgcgacggattccactggaaagatgtctgtcccgactattatgagtttgccaaagccagccacgccgaagatcggcgggcttttcatctgcgattgctgtccaaagaaacccaagaaattcgacagcccagatggcctgcggtaagttgatcgagacgtcttcatttatgatccatactaatttagacagtgcacacgagatggagaaacagtacgcatgcgcctactgcaaccaccgcttcaagaacaaaaacgaagccgagcgacaccaaaactccctccacctccgacgccattcatggtcgtgcgccgcgctcgtgactttccaagcagcattccacccctcaggcgcacaggcctgccagaccagtgccggggctgcgcgtgacacctgcggctactgcggggaggaattccccaatttcccacaggcagactgggaccaacgattcgagcacctgaccaccgtgcacaaattcggcgagtgcaacaacgcgaagaaattcttccgcgcagaccacttccgacagcatctgaagcatagccatgctggcacgagtggaaagtggactaacatcttggaaaatgcttgcatgaaagaagagcagccgccggagcctcgcgagcctcggggaccaaaggataaagctgcttctggcccccagactgggtcattgacgaccaatgccatctcggaagttattagtgagcaatgacaatcaataagtcgtgtctcccttgatcgcggatttgctcttccttgtggcatccggctacaagacggtttccggcaaacggctctgtgctgttaatcacatttgccagttcatactctgcagttagatgatagtccaccctcgtggcatcgtctactctttttggatatcgagactaaactcatttgcattgtatttgcaatcatgggtattaaactagaattctgaatctccaccacatacctgttcataaaaagacagcatcacctcaacatcaatcaacaacaatctcactctcatcacaccggggacattctcatctcacaaacaaaaacaacaaaaacaaaagcctctcatattcattctagaaaaggcaaagtgagacaagacacttaaaaaaaacccacacaaggccaaaaacaagcctgaactcacgacctgaaacgaacatttttgaacatttccttttccacggaaagagaaaggggggagggagggcgaagggagtttatagtcgggactgggatctttttttcaggatcaataaaaacctctgtgtataccccggttgcattgcattgcaatggggaggattttcctttctcattctcatctcatctcatcttttttaaaaattggagtcggtttcttggttggttcctcgactgggtggactggaatacaaggatgaatggaatactggatggaatacctgcgttcggtttgtgtctattctggtttttgctgttctgctaggctcttatatatattcccccgcctgttttatacatactttggatggatggaactgtgaggcgaatggaggggcgttgtatatatattctttttcttttgcatggtagcctgaacgaaatatgtggctttatgcctttttctctagttattttggttctttccaggattcgctggtaagtagacttttcagtattaaatgtaaatcctcattttgatatacagatacacctagtgagtaagtaggtaatgttccactagagaacaaagtaaaagcacaattattcaaacacaagactcttgaacccatctaaatctaatagaaaaaacagcctggcccaacccagaaggaaaaaaaaaaacccaaccaatctccacctactcagtaacactgtccttaatactccgcagcgcactcaacttatgctgaggatcaatagcagcagccatctgcgcccgacgccgggcatcagtccaaaccataaactcgccataccccttcggcataacatgcacatccttctccacaaggaaagtatagttaaacatgcccgtggacttcttcgtgccgtgctcgacatcccgcaccttggagtcaacgcgcacctgcaccttggtgtacttggtgctatcaccctcgcgctcctcgggctccgtgtacgcaaccgtggcgcgtaggtacagcacgctgcctacgggaacggggttctcgaaggtgctggggtcgagggcgacgaagtttggtcgcgcgtgtgcgaaggacgcggcgcagcagaaggccagctcgaaggtctgttttagtaggaagccgccgaagatcatgaagttgtggcggttgcgatattggggttgcatgatcatggcggatttgaggacggtctcgcccatgaatacctggtttgcggggcgggtaactgtgctttgggggtctggggaggttagttttttttgcataatgggtaatgtagtgggtgaaaagcgcttacttaagtaggacatctcctttgtccacattgagtggatcaggttactctcttcctcgtcaggtgctttctccaagaggctgcgtgtgcgacgggccttcttggcctggtaattcgcctcgcccttttggaagaggcgtttttcctcttcagtttcaatgatgagaggagctattgagacaggcctagttggctgttagtttgtgtgtatcacgccataagaggagaacatacttcttggtagcaggatccagagagaccatcgtgaaagcacaagtgatcaagacatcttcaggtttcgccggctgtccttccgggcgggccttattgacctgaagggagatttccagactggagcgacctgtcgcataggtacattggccgctgagctcaaggtcacaaatttccatcagcggattctcaatggtgatccggtcacacgccgcagtgacagtggatacaccgtcacctgtgtgacggtaagcaacgatgccagctagggcatcgaggtccatcagaagcgagcccaatctaatcgcaatcagtcaaatgcccctttgatatgtggctatcaaatacgcaccgaatatgcccagaggaattgagataagaatccaaaagccatttgtcttgcgccaaaggcagaatctaccaaccagtcaataccaacggttccaaccccacgatataaaaatttcatacgcacagcactgtaatagctatccgacatcttcttcggcgtgacatcacgcttaatgctctcatcctcatgcgggccaggcttctgagcctcgcgcatttgtgtcaacgcgtcgatccacggagtcttgacgcgcatgggcatccatgttggccgggccgctgcctgcgacggcgtggagtgaaaatcctgggtgttgatgcaggatggctgagctgcgactgcagctcgcgcgggcagcgcagccaaggattttgagcgagcgagcgctgatcttctactgaggccgaacattttgatgtcgaaagaagggggattaaaaattagataaggatgtagatatcggtcgattgtactccgtactcaaaaatgacgatgtcccgaggctctgacgttacggatgtctccagtgaccaggacagatttaatcacatggtaggttggcagaacgttaccgccctggtcgctggacttttacagtgaatttactggcaatttacttgattgttttgctgatttgaatggcagttagttctgtggactaaatttcctggcaaatatactgaaacctacatattctaacgagctgaagtgatagctcatgagtctataaattacgtatctcatggtcactgcagcgcgccgtgagattatttaccggctccggtgattttcggcccggataagagaaacgatgtcatcacttccgattgggaccccgggtttttatattgttctgtagatgtttgcagctgaaagtgacacctcgaagcacctgaaatggaatacaaaaatctaagactaaagaatcacaatctagggactcgattattgctccattcaagctgtcggctaaaacaactcccggttgccatgtgtatctgtaagggttcttagcagtcttgcagttcggaagaaggttgttctgtatcatgcaaaactgaatacactcatccacaactcctttttcatttcattaaaatgcggagggtatatcgtacgatgattgtatcttggagttcatttaagcttacatatagaaccaaactttccgatggccaaataacgtcaaaatgaagtcatcaatctgatattggtttataacactcacttcaaggcgattaactctttttttgcatctattcgaattgacattgacttgaagaacctggaataaaaacaacaacatctatttccaacatgagtgacccaacaaacccgcatatcaaagagcgcaacacacctcaatggggtctctaccagcgagagaacttcatgaaacagagagaaggaacgacaccacttttcaacactggtatgttttcaatatgatctctccaaacctacagaaaccctaactcttttacagacccccggaaactggaagaaagagccaaagagaagctgaccgagggcggctggtatatatacctccccatcacacgagctcaagatccataagctgacaagaagcaacaggtactatgcctcctcaaacgccgggatgtcaaacacgcacctcgtaaaccgacaagccttctaccgccaccgactaatcccgaaccaattaatcgacacaaacaaccggtcaacaagaacaacaatcttcgaccacaacgtctccgcaccaattggcttcgccccgatcggaatcaacaagatctaccacccaaccggcgaagcagcagtcgccaaagtcgccaaagagctcaacctcccctactgcctatccacagcaggcagcacctcgatcgagaaagtcgccgcagccaacgggccaacaggcacccggttttaccaactgtacatgccgcacgacgacgagctaaccgtatctctgctcacacgggcatgggaaaacggcttcgacgcgctgattctcacgacggatacgtggcagctcggatggcgacacgacgacgtcgcgacgtccaactatgcattctaccgcgggttcggcgcggacttgggacttacggacccagtgttccggagcaggtgtcttgcggacgggattgatcccgatgtcgatattgtcgaggcgtcgacgaagtggattgattcggtttggcatgggcaggcttggtcgtgggagaagatcccttggttgatgaagacttggaaggagattagtggggggcggccgtttgtgattaagggcattcagtcggttgctgatgcgagggggtgtgtggaacttggggttgatgggattatcgtgagtaaccatgctgggaggcaggttgatggggctgttgctagccttgatgcgcttgagaagattgctcaggctgttggggataggatttatgttatgtttgattctggggttaggggcgcgagtgatgttgtcaaggcgttggcgttgggggcgcggtttgtgtttattggacggctttgggtttgggggttgagtattcagggtgaggatggggtcagacatgttatgaagtcgttgctggcggatttggatattttgatgggtgttgctgggtacaacggggttcaggatttcaacctagatattcttggtgagtcttgtctttgctgcggtgtaagagtgaatgctgattaggagatgcagagtcggatccgaagaactacacgctcatcccagagaagactttgtgaatggagacagaccaggcgggatcctgattaaattgtccatagcatagctggtatagggacagcttgttactttagtctatactcaatctacaagtcctcggctacggagttttacacccctcatgtattccgtaggactcgtcaagtggctatgagagccacgacttcaggaacgtccacgagaaagactggtttgttatctgatgcagacctacatggacctcatgcatatggtaatgttatgatccctgtggtaggtgaagcagcatgtgctacggcactctctgccgacactgtctcgtgggggctacggtgagatggtggccagagagatggggagagaagaagaagaagaagaggagaagagaaatggggggaagggtccttttatacccccaacccacgtgccttcctcaagtgcgacaggtccctcgctccttccagtcaatgtcaatgtcacatgcattgtgccttctttgtttgccttctttgtttacattgtttgcatagagcacttccaaggaaggtgcatcgactagacattacaactggaaactgtccatgagggattttggcgccttgccaataatgtagacttttgtctatataaatgaaaataatagcaagccatgtccagttcaaacgaaggatacatgaatgtgcaacacaaaagagtgatatatgcagccgagaaaagccgaatagacaaagtgccgcaaacgtatgctagatgagtgggctaaatatgtagacccggtgtatcaacagaagtgacatgatgtgagtgtacaatgattgacaatatgcacagaaaagacgtgggcgacaaatgagtgtacagaaatagtaatacaaaggcagaaatgattgtcgccaaatcagaaaaaaatgccgggaagggaaaataggctaaaatgcagttcaaatagcaaatgcgccgagcatgaccgtcagcatagaccagctaatgccgcggacgaggtgggatgcagagccgccggagactgtggccattgtagaggaggtcgatgtagcattagcggcagacgcagcggtgccattggacgccgatgcagtgaatgttccattgcccacggatgaggaggatgaggagtttgacttcgaaagcgcgccgaatccgatctttccattgtcgaaatcaaacacggtgtagacgtttttcaaaaagacatcgccgacgagccagtttgcaccgtttgatgcatagccgacaatggtcgaaatgcagtaatctgaaccggtcgactcggtatttccgacatagtccttaggcgagacgctgtatttgacaccagagaactcgaactcgatagtagcagtcgagttacaggggatcaagtagttgttcgagttggaagactgttgggatgaaccggggacgagagaaaacaggactttggcatctttcggagggatcaggaggtaggtagtgccggtgtcgatggtagcggattttccggtgaagttgcaactctttccattcacataagcatcatccacggggatgctccagattttctcattggtggcagtataggaaatggtaccatcgaatttggtcgtatcgaccgcaccaaagttgatttccccatccttcgcattgtctgccgagcgagagagactgaacccaaccaagtttgatttgatgagctttttctccgcaacaagatccatgaaagatggcaaactccaccctactgtacccgagcgacccaggcccaggatcccgtcgaatggataactctgaaaagcttccgaggcattgtcggcttgaccgaaggtttgctcgacttcgagccctgcaagggagattgcgtctttcccaatctttccggtgaccgtgccactgccgtaggcgagggtgaaagtcgaaccggcggtggtgtagctggtggatgctgactggttgaaagtgtgatggcttgtgcagacaggctccgtgcattccgagtcgaagacccaggtattgggtgctccggtgtcgattgccatccacatttcttgcttttgggaacctacgaggacgggagagaagtatgaataatccgttccgtcctggtttaacggggcgctgtttgccaatgacggcgtatgggactcgacgatcttataggtatcgtcgcggcgaacgggcattttctttaggtcaatggtgaaaggtttcgtgtcggctgcgtcggtactctcatcgtcagatttggcatcaatcaaggtccatggaacgaagcgacgttcgactgtagtttccgtggagagtttcattcccaattcccatggatagaaggcgtggacgcctgatatgccggcaatgaagaccagacatgatgaaagatgcatggtccctaggggagtttaggcagaatatagagaagcccgcatttgatagaccgaagccggattcaattgtatgtctcttcatgcaatataaccgctgtttcctggtgagccgaggaattgaaccgagcagctgaatgaatgaactaagtgacagactaaaattgaaaagaaaggctagaaaagaaggtatgaattataaaatgaattgtaaaggcgaggaagttcgagagactcgaaatgtgaaagatgggaggtggcggacattgtctccaccgttgaaaaaacccctgacaagaagttggccaggctctaagccgtaagaggaatagtttccaccttctaaggctcgttttagtactgatcggccgattaaatgaagctagtggagcccaaactcaatgtcctatagaaggaactgaacgagtcaatatttgatcttgaatcttaatccttggactatttttataccgtagactatggatactttagagaatctggggagggaatgtatcaatggtcacaaagtaatggaaactactccatatgtactttacatgaagttgaacagcaaacgttgaagtttttcgtgggaacacatacaatgtaaagatgagatagagcgaacaaaaatggaagcagtaaaatctcaatccgcagaatgcgatgcgacgatatattgcccaatgcccagacaccattacaacgtaaggtctagactcgcaggatttacgcctccactcgggtcgagaacgtctgaccctgataaccctgacagggaccacttttttttgcagctagtacataccgcaagtcactgttcgctgaactattcaaattgattcaagtttaaattccagtacggattttgggcatttcgacctgatccaattgcctgaagtaggtagatcagtagaagacctaaaacggatcgaacatgtagatcgtgagctaactgtggagacagatcaatcgaacacatccaggagttccaccgctgtgtcacaagctgtgcgtactccgtatatcatgaaacaaagccagctatctgaaaactaataatttgtataccatatatcgctagataataagttagagcagatgttatacgagtacaaattttataaaactactgcctaccatagtgacactgtgcgacatgttactattcgtatctcggtataagcatacaaaagttggacattggtggcaatatctcgatttcatacaggagtcacgacttttgctattgctccatcggaattgacatttggaatgagcgaatagttactgtatagatttaggtcggctaaatgggcctagctatggagaggggaactgcctggtaaatagtacccaattatgcccgaagaaccaaagacccaaggaagcacacttcatgcccaaggatctttagggctatctcgaagtagataaaatcatcctaacaaagacacagcacccgtagatcagccacaaccccttaactacggcccaaacaaccacaaagcaccagccacatccggcctcaactaaaacaacaaaaggaagaaaaaaaactccaatgacgcaacatccaacaaacccccaaatccccaaatccccaaaaaagattgataaaacaatcagataatcaccccagctcaccccgaaatagcccgagcgggacctctcccttccccacgacatccaagccccatcccatccgtcccaccgactcagcggcaccaggaaattgcacggcaaaaaaacatacctcggaaccgcgaatatattaccgcggtgccgatagacacacggcaagaaaagaaaaagtgggctgattcgattcggtatccttactactagtctacataactagtactagcgccggtccgtctgagcgcgaacgtgcggacgccattgttccggcggtggatagggacagttatcggcatccgggcttaactgtaatttttagggttattggacacccatctcggcaggcacacatgcgtccgataactaccgagtatgtagttagaccgcagtgtcatccgatgactcacgtctggagctccgcggctggtctgctgacctcgggtcaacggtgtttttttgattaacggcggaggagagatgcccggggaactggatcttcacttgttgtactccgtagatcatggtgggtactattggatttactgcctcggcacagcggagaaggtgtttttttcgggtttattccgcgagtgagggtattgggtcattgtggcaatggattgtggtaatttggtaatttgtagattggaaaggtatgtggatgaatgtgattgtgtttgaattgctctcgctttgtacctatctatttgctgtatctaagtatttagtagggtatgacttatttcgaagatgtagatagtaatgttcaattgactgacacaactcgacacagctgtggaataagatgaaaaagaaaacaaaaagccatgatcggctgacatcatgaagacgtccacatgggaaagataatacatcaaaacgctagtatctcaaaacagtccgacgaacccaaacatgaaaaagacatagcgtgaactatgtatcaagcatcacaagaattgtctcatcccgtcaacaggaccgaaaacaacaagaatagaccaaagagacagaatctacttcctgacactctgcttgggccccagaacatcatcaacgaagccagcccaaagctcacgtatgacaccgggctcagaagtaccattttctttgcgctggagctcctcaccggcacgcgagcggccgacggcctcggtcagcgagaacgggtcaaagtcgacggcgtggttatcgacgacctcgctcatcgcgctggcctggacgtcggggccggcgccgccggacacggtgtagatctggggcttcatggatggggggctaggcgtttggagccttgtggagggcccggaaaggaccgggacttggatggggcgctgcagaggggcggcatcgagctctgccatgctgggcatgtagacgaagtcgacggttgagttgtcgtgtgtggcttttgaggcgcgggaggtgttgaattggcgggaagaagggctagagtgtgttagttttgggtttcttttttgaggggttggattggaggtaaggatggatgtatagaatggaatgtgtgggacatactctgagaatgcattgccgttgattcggcgcatggcgatgctgaaggcgcgggattggaggacatcatggttggagagggccttctcgccggggttgacgggttgagcggcctggactccggtgatgtgaaggctacggcgagcagcagatgccacgggctgttgagaaagagcgcggacagcgcggagagaagatgaacggggagcaatcattgtgatggtatagaatgtatagagctatagctgtctgagatagagctatgttgggatgcttggtaaaggcagaggtcgccaggtatagagggaaagtggaaaagggggagtgagaagtgagggagcagagtataactaggaaccggatgggagctttatagagcccggggaatggttggggagagctatgaggccacttcttggcggtctggaccgttatcgatagtgtcagccagaaaaagtatagcacgtcaacactggagaaaagatatggagtacaacatagtggatttgttggattcgttggatttgatttaaaatcgaacagaatgtggataattcagactttcctctacaaatgtatcctcttggactaccatggctgttgagtccaatcccccagacacagatctacggcgtaagtcctatcgggactacaccccagcactagcagtgacaggatgtacctggtacatcacttaccccccgaaaatgatgtattccctaaacatcgtatcttcccctcccaaagtgaaactggtgatcattacgtcgtctctggaagatcatccaatgaaataaccaccagcatagacagcggccattattgggtgtcttcctgcagaacggggtaacgcactccctactccataatcgtaacacccatctgcattgtccaacgtagtcccccactcgacgagaagtggaaaagaaggcggagagggtatccggccggagatacatgccatgcacagcggttccgttatgcatattgctctggaatccccgagttgtgagtggctcccacgcccaactggtgagtcagtctgcaccaaaccttggtcgcaagccacaaaatgtaatgcaattccagttctgggaaagaccggggttgatcgccactcctcaacgttgagtaatcccatgacctgatagtggaccttgaatggattcgaagaacaatattccaagaccacggaagcagaggagtggagcggtgtgagattcggagttaggaccgccttccgagtgatctacaaagtacgacaacgtacacttttggcaacagattcgatgtgctacgcagtacaatatgcaacaaacagttatttcgtgcagatgtccttgatcgtctatggtgcgacgtgtccgtttgtcctttttcaatttccagattcatgcgtttctcaccccgcaatcgcttaatatgcccggaacctccggatcaaaggaatcgtgtgagatcagcagaccctacggagtacggaggagaggtgctgtaatgtttttatggccaggggcaggcaagtattcgatggctgtaagggcccgcctggggaagtgtcgataatcttggcaggaatgaattgttcccctttcctccctagatccgagggtcagaaatttggggatttttgatcataggtcaagtaactagtaaagtaggcaaatatactggtctaattaggtaggaaatatattctgtatggtatgtcctaaagtaaatagatggctaacgtcaccgcgctatgcgattggtcaacactgcaatcccaatgcaatatctctcatacgattatccgacttgtatattcaaagtttcgaccccggtcgccgtcctttagctatggcccgagcgtaagggtgcgagcgagatgctggaaccagatggtcaacatccccggtgtgcacgagatcaggggccgcctccgccagggatgtgatgccaatgttccgcatagctgtctccagctcatcttgcatgactgaagaaacctgaatcagcaaactatcaaggcaatatgtcaatcatcacttactgtcaatcagatgctccactccctcctggccatagttagtagcaaagagcatgctccgacccattcccacggccgttgcgcccagacatacagccttgaggatgtcagttccacgccgaataccgctgtccacatagacctccatatgatcaaagacctccgggcagcgtctgtggatctccaggagcgtgataatcgacggcggactggtatccaggttgcgaccgccgtgattgctgagcaagataccatcaagccccgctttcatggcgagaagcgcgtcatccgctgacatcacgcctttcagacacaccggcttgtgcgtgtgctgcttcacccatttcaaatcctcccatgtcagcccaggatcgatgaacccagccatgacgcggccgagaccgccgcctttcttgtcgttctgcgctttcgacggcgacataggcacggataagctctcgtcagccttgacgcgctcgtcggcttcgcgcttaccgggccacgcggcgtccacggtaacgaaaattgctttgatgtttggattcgctgagcactggcgaagcagggcggcggactttgctcggtcccggttgacgtacagttggaagaagaagtcggccgagggtgctgccgtgcgcagctcctccatggtgtaggatgagttatttgaaatctatccagatcgtaagctagtgactgacaatggcaacacctatataagctcactccttgcatgattcctttgcttgcgcaggctctagcaatggcgcactctccatccgggtggatgagctttgccattgctgccggactcacgaatagcgggagcttgtaactcccgccgaggatatttgtccgggcatctactgaacggacatttcttaggactcgcggacggaaccatatgcggtcaaagcatgatttattagcgtcccgtgtgatcagatctgtagctgcgctggagtagaaggcccaggtcttcttgctggcggtttttgaagcgacgacctcgaagtcgtgcgagttgatcagtgtctccaacgggggtttctcgttttctagtatcaccttggcactctgccccggtggtggtttgacccactcagcgtcaattgtagattcatcgaggacgcccttgaacttctccgggtggagattgttcttcattacgctgggtgcatggacttctgaataggctttcgttgcatctctccctgcatgcttcaggatgactattcgcgaggtacatcagatatcgtgctgagatcgtgcatttgtcggtgtactaacttgcagatcctccgggatgctcttctaaaaagtcggtcacatcccacacctgtttgtcgaccacaacccagcagtcgccgggcgttttgtgctctgagatctgctgagcagacagaagtttttggtctgccattgctgtcgggcggtatgagcgtgcgtattcttaggtcagctgtggagaaattgaccgcgatactaaaagacgccggtcctgtatgtcgaattgtgaaggagattgaatgagtggagacaattcgaaacagccatccacagcgagctaaatactcagcaagggtcctgggcggggatggccttcggtaatgtccccggacttaccccggactgcgcgggctaaagtctcccgagctttctgtcgagcatctaactttctatatgtagtgctgtatgttgtattcacacttttgaactggtcttggatgtctttaggatcaccctacgcaatcagccccagacgataagaacagcaaaagaggttggtgttcaatctgagcttacacagaatcactcatgtttgacgaaatctaaccccctaaaggtgtctcgaatcggcaacgcaccgactggactacggatttcgctccgagcggagacttcgagcgggggtgagatatgcctcctgaaatgtcaggcatcattcatcaccagccacattgaatgcctcagccacaatgcggctgagaactttccgaccggaagtcaacacacatttcatgctcgacagaggaaccatctcaacaacacaataacaaggatatctactctatccatctaatgccagtcaactctgctgttggctgtgctttgaaaaattttcgccgcaatatcacctcgggtgtgaggtcaacaggcatagatagacctgtttcgttaggtttgtcttgtgtccaaatacaggcttaccacctagtctagccgtggaggctgagtgatctggcaaagcttggactgactcatttcgtaggttttcataagagtcacagcttgactggtctgtcttctataaattccatatctgctggaaatcccaggacaatctccacaattgaaagacaacagaccacattaaaaatggccgaatctaaacctctccgatatgttgatgtatgtcccctttgtttattttcgaaatgctagtcaacacatagctaactatgaaacactagatcggtatcaacttgagtgatcccgttttccgcggtaaatatcacggaaagcaggcccacgaagacgatctcgacgacgttatccagcgtgctcgcgacgtaggctgctcaaagttcatggtaaccggctcagatcttgtagaatcgaagcacgctgtccatatcgccagcaaataccgtgagttatgagcttgcccggactttccctctcttattaacaacggaattctacagcgggcttttgctatgcaaccgttggtgtgcatccctgtcaagcaaaactcttcgacaaatacccaggcggcccagacaaaatgttggccgagcttcgtactctagcaattgaaggcacaaaagccggccatgttgtcgcattcggcgaaatcggcctggattatgaccgactgttcatgagcgccaaagagccacaactcaaatatttcgaagcccaactagatctggctgttgagattcagctccctttattcctccactccagagctgcaagcgaggactttgagagactccttgccccgaggcttgcaaagcttcccaagcggggacttgtgcacagcttcacgggaacaatggatgaaatgaaccggatggttgcgctgggccttgatgtcggtgttaacgggtgcagtatgaagactgaggagaacctggaggttgtcaaggctattccactcgatcggctacaaatcgaaactgatgggccttgggtatgtacttttcttagctttgtctggattagtcgtgactaacctatcccccagtgtgaaatccgtccttctcatgcatctgccaaacatttagatggtgcgccggatctaccgaaggctgtgaagaaggagaaatggcagaaggggtgtatggtgaagggtcggaatgagcctgtggccatcgctcgtgtggctcatgttatcgctagcgttaagggtatcactgtggaggaagtttgcgaagcgtaagatgttgattcgtcctgatgcttggctctatactaactattcttctctccagtgcttggaataactctattagaatgtttgggttgggcgaggagtcaccttgattttggtattgccgacaagaagatgtgatgattcagggcctttgctgtagctatctaattatgacagccatggcgactgggaactacctagtacactttcgcaattgctcaaactcatggtctcagcagcaaaaatataatgatacatctcaatggtcagggtcgtaaacattatttatgtggtattatatatcacaacaaaggtatcatataagaatctaaagataatcagccattataatgtccgcatcgcatgcctccatatcctctcggggatcataatctatcacgtagttttccggataatccgccaattcgccatgatccgagagaagcatagcatcacggtcaccgtatgaagtctgggaagacccagttgtcgataacaatgtatcaagagatatttgcgtcgattccccgatgtctgtgaagcttgtctcgctgaaattgtccaaaagctggtcctcggattcgctattcaacaagcacacgtcgctttcttcattctcgtcgtgatattttgtttgagaagaatgacactgtcccggattttcattatcaggttgatgctgatctatagacgtaagatccacgagctcgtctaatccagccagtgcgttcgatggaaattctgtgaaaagcatcgaaactcctcttcttctgggttttattctgggcacattgttctgcgcgacacaccaaagggatgagaggactgcattattgcaacttggaagttgaggctgtatcgccaagtcacccgtctgatgggaggaagtgagctctagcaaatctgccaatttagctttggtggatagattcttgtttcctaccaccaaagacgatatggctttcgtgatcattggaattgtcactcctcgctgattcatggcctgaataaaaattaatacccgattttcatgatcgaaactgggaactcacatcccgatatccaggatcgaaaactgcgggaaatatatccgcgaagctcttgatcgtggatttttgtgagacactaaccgtgggatctttgatcgagttggaaatgattagtctttggattccaagatcgaacagtcggaagagttcttcgcttgatggtgatctttttccagatatgcgaacagtctgttgtctaacagctgcgtaggaattctcgtcatgcattggcagtaggattttggtttctaccatttcctctaacacatgaggactcgagacaaccgatgttccttgtccaagaagactaacctccaacacggaacagtcctcggcttgtgatacatctttggcttgaaagcgatactccagccgaacgtcaatcgaagccaaggtagctactggtacaccagggggaggacgcgcatctgggggattggtcatcgaaccaggcaaagtccgacccgttgtgtggttccgtgctagacaccctctgtgcataccaagttggaggaagtggaaaccagaagtttcaatacaatatctcttgagctcaactgaaaatccgagatccgaccagatctgaagcaaggaagtcagtctccaatttgagaaatattttcccgcacacacctccatatcgcaaagtttgtctctcaacttcgagatgaatgccgctgcttcattttgatcccaatttcccccgatccagaagcgcaactcaagctctggtgcctctgttatccatatactttcaagatttgataattgtgagaggtcaattggtatttcgggagttggatgacttggcgattggttgaaatgagccgatgcggccaggcgaagctgcaactttgaatctcggattcgcaaagtggatttacccaagtcgagcgtttgtgccattgcagaagaggctcatcaccaaagcatcataccttcttttggagaccggaacagtcatttaaacgagcgatttggggattggtggggtgttggagagggatggatgcggctacagtacatggacggggcacatgactttagactctttccctgacatcgcgtgcatccaattcttaaatatcactttactttcctgacatgtatttgggttttgtaaaggctcagctgaaaagctaaattcttgttatagatcttgcttaaaatggaaattgctgctgagatctgctcacggcttaacagcaacacatctcagactggcatatgtgatccattgactcccatcttctcttgtagtcccataccggagcattcggcagatctgctctatcgcactattcttcttctcctcggtatccaagatatccagcatctgagcgccgattaatctcatgaatccttccagtccaccgttatcagaggtggtcagctccagcggttgggggttaagttcaatcatcttaacctgaaacccgacactctcaatgatcttcttcatatagacgtcggacggataaaaccaggggcacatagcttccgccgtctcgattggaactccatggttgacaagggcgaacatgaatgctgtgaccttttctggtgcatttccatgtccgcacatctcaaagaagaacgtacctccgggcttcattgattgaaagatattttccaatgtggagatacgggtagatgggtctttcaagatccaatggaatgcagcattggaagtgctaaaattgtatcagcagggttctacaggaagtggaaacacggatactaacactttatcccagtttccattcataacttctgcatattcttcaaggtgccgacaatcgacaacgcggaaatcggtggtcgttccaccgtagtccaatgtcttggccgtgttgatcatggatggggaagagtcaacgcccataacataattgaccgagggagcaaagctggtggtaaacttgccatcaccacatccaatgtctagaactctgtccgtagggttaaattctatgctttggatgagagtgtcggcaaaatgggggacaaaagaagccgcagctgcatatgtctagatttggtcagcgcagacaagacaaggcaagagttcatgaccacagacctctgtagaccaatagtcttttggaggaatctgtgtctgggtcattttcaagtgtatccaagatatatggacttcgtgcagatggttagaagaagataggagcgcttagagaacggtatatgacttatttaagagaatgtatatttctgattgatgaagcgaatcttcaggctgcaatccgctgttatccgagtgccgcatagatttctcgcgtggtcttacaagtttaattaggttgacgtggcactcatgggtaaaaaccaacaaatatggagaggcttcagctcgccacaagtcagtaccgtcaccgccacatgcatcgaaattcagaatcatgatatttgcagatctctgctttagccagccaaatcaaaggatattcacgttggtggagcaagccacacaggatgatgagctttgccttactatttttctatttctggggactcctgagacgagaggcatactttgtacaaaatgaggtttgtaagcgccaatcatgaacgattttagtttctctgtctcgggatatcattttacgccttgatcggcattacagtcccattctaagtacgatataatagggtaactactcatgtgaccagcccagcccactagagatcacttctcgatagcctctcgggtgtgactacgggaagttccgtgtggaccgagaaatagctccagcgctaaactgcgctaaactgctctcgactgggataacttggcatgcatccacaaaatatcttcagctcatggcgttcaccggtctgttccagtcgtaatctcaccacaccgacatcatgcataagcctgggcagtatcaaaatccatcagtacgtgaatacacagtagccggcagatacggccgagccagccactttcaatgcaggcagtcaccgccacatatagtgaggttaatttagctgacaacgccccgagcaattaaacgtaggcagtcaaccaggtcatgactaatttttcgctatcagtgtattgatattaatgccgatcagcatagtagaactttatttaaaccccggctacattcaattcagctagccactgaaatagtaaatggggcaacctattgacagaattatcgtttgcagctggtagggcctcggctgagatttccgcggaagatggcccgggagataggttttagcccatccgcagagttcatagactcgatttaccgctgatgtatatatccgtcctttgatatcctaatccatccttagattctcagaatctgccagcatgactatcgaagtaatgtcccatgagccatcccctatcaaactcgcctccctcgcatccaccatcaacgaagcaattttgcaatactcacacgctgagtctgagtcagagagaatatcagctttaaaaagcatcgatgtgacctcccagaagcttgcacaatgcgcagtggaaccgagacggtctctgatggcgtttcacttccaaccccataaggttctttgcgtgaggctggccatcgagatgcgcctttttgataaccttccaacctccgctcctttcacggttgagcacctagcaaagcaagcaggaacagacttggaatttactagtcgcattgcccgcgccttaggagcattgaacatcttcgaggaggttggagaggatacattcaagcagaccgccttgtctcaagaatggaacgacaagttcatgcagtcatataccagacactcatgggataatgttttcagacccatgtcttcatacattgagttcttcaacaccacgggtttcgtgagcccctctgaccgactgaacacgcctttcgcatttgcgaagggggccaaaaatgtggattttttttctctgctacaacaagatcccaaagctgcaacaatatttaatgaagcgatgacaagcttcaaagaccccctaggtgacttatacaacttcagcagccttcaagtcgaagaggatggagtcgttctagttgatattggcggtggaaaaggccaaagcatccagagcatacaatcctcatatccaaacctcaaagggcgatatgtcctccaggatctaccagcggtgattgcagctggagatagggtgtgttcgcccgaagtcgaagtgcaaccttacaacttttttgaagaggtgcagcccatcaaaggtagatagacagagttatatttggacttgatatgatatttgcttatacctgttatttaggtgctgcggcatatctactcaagctcatattacatgactggcaagatgcagagtgcagaacgattctccgaaacttagctccggcaatgaggggttacaaatcgaagcttctcatttgcgatattgtcctgacagatactcggccagacacacaaaaggttctttatgacatcaacatgtttttcatggctggtaaagagcgcagtgtgaagcaatggcatgctctcatggaagggactggattccggattgaaagaattattgggctggataaccctgttcgcagtatcattgaggttgtgttagatgggtagtcattgtttttctacttttctgaatgaatgagaaaagggtcctttgtatatatactgcagatactgtctaatttttcttgtgccatggactgtgccttttaagcctaagaatattgtatagagtatactggcttaggatggaacctaagccagtatactctataaagaggaccacaatcccaccccactccatggtaaacctaccaataaagttcaagttgaagcctaatggtacttggactttccccggacacttaagcagctagaaacttaccacggtctagtagggtatctccgtaccaaaaatttggcgacccgcttagataggcagagctatatacgataggaagacggagctgcttaaagctagaccaaccaaggggtcctaaagggaagctttcttactaaggatactagtcgaaaacctgacgagtactgagaaagctagcttcgataatctctaagctgcgatacaatacgccctcgttcatatgatagacttcttcgaccccctcagacaactttacgccgagaccgatagttctaaggacgaaggccacagcgtaatgatcttccacgtgaagaaaggctgggcctacaccgacacgagaaaaccccctctagccaacttagtcgagccgatcatgttcctaagccgactcctctcctctgccgagtagaactactggccgaccgagctagaagtagcctacctagtcggggtactacaaaaattaaggcacctgctcctcgctgtgccagccgaccatagcgctacggtcaacatcgccgtaaacaccaatttacgctcagcggcgacagagaaccaaaatctccgtttggtcagggcagcccaatttatccagacattcagcttgaaggtctaccacagatccgaagcaacgaacaaagtggcggacgccctctccagactccggagcgaggacaacgatttagacagctttccgcagggcatcgatgctttcccggcaacaacccaggaaggcgaagaagaaccatcaagctccggaacaaacagtacggtcttcacggaactttctaacgagttgaaagaaaaaatccaatccgggtaccaagccgactccagatgggacaaagtcattcaaactctacaggaggaggaagcctccgcagatccgatatccaccaaaaactgccgtacagactagacgacaacgggttgttatatctcacacataacgacggaaccgaagccctctgtctcccaaaatccatgacaaaggacattttcagcttggttcacgaccacaaagcccgccaatgctatgacagctgctggcagagaatgaaggggttctggaattagggcctatctgagatcctgagctggttttgactcgttctaggctggggattctgttgcgcgggggcaagctgctgttgctgctgcttggcttggtactggttttggtaatgaccttgttgccaggtttgccgctgttgattttgccatcttggtggaggtaggtggagatgggtctggggttggctgggagcgaatggttacgcgtggcctgccgatgtggaggactgcttctcgacggtgatgtttggggttgcacgggtggcgttcattgggtctgtgtgctggtgtcgtctatgaagccgcgagtagagaggaagcggtccatctgaatgtccctttagacagcagccaacgcatcaacttgatcctgagtaattgtcccatccccaacaaggcgctgcagaatctcatggcaaaatctttggcagttattgacaacaagatcaaaggggcggttctccgccgctgcaatgcacagcgcgtcaagttcgtcgtcggtgagattaagcccagtggcgatttcaactgaggcttcaagtgaacgcgaggttgctgggtttatgttatccatcggctcgtaagactgagccttttttcagtatattggagtttgagaataagatataagtgcataccgtcgtcccgctcagcagggaagccttactcgcatgaaaaagggttccggtcgctgctggggcatcccagagaaagctgcacaaatattagaattagaattattcaatattgctccaagcttgagacttacagagcccaatgagccgtgtcctcggggaaccagcgggattgattgaagcacaacagagttgatgttcttgtcatgacaatctagcgagctttgtcttgttgagcagttaatcgcgtgatacgtgtaagacggaagattgttcagaagtttggtagagaagagacgcgtcaagaggaagaatggatggggacaacttgtaagtaggagggtcacgtagctgggactgactagagcttggagttgtttgtgtccatctgtccaaggctttgatatgtgccttcactgtcacaattattttgccaagttcgaattttgctggcctccaaagctatagtttgatattattaagatacaaaactattcctagttgatacaatttcctagagtgttgcagttttcaatccaaatacaatatgggccgagtttatgctttggcctttcatgattgggactcgttccttccctttcgggctcgcgagtcacttgctccttccctctcgagggaagtcgttccttccttgacagtaagcgagcaggctttgccatgggggtataaaatgtataaaattcccgccgtagctctgcgttctgttctcttttctttttcttctctacgtttagtatttcgttagaatgtactctttcttatcgaattgacctgatacgtaacatactccaagccttacagtacccgagattaatatgagctgatttggaaagaaaaatagcaaaagatgacaaaaacggactaagctttttatcaaattactggctctatatgcgttggttgattctcccctagaacatcttccttcattactgctatcctttatcctaaaacgaatatggtttcctcagctatagaacaatttcaaagcctctgggctgagagagcgctgcaacattaccgggatctctccatcaacttagacaagcgcccttataaactagccctcccctagggccacactggacaggatcgtggccacgggccatgaggactttgcccaataccatgagctgttcagacatgaaaacgctaagctggagtagtcgtgctgcgtggtgttttagtcagtttgtataatagtatgagcttagctaccagccaggcgattccgcttcgcccaagttcacccaaaggacagagtttttgtttgagatgtaactaagcgctcgttctctgagtctacgcatacattaacgctaattctaaattccatattattataagaagcgatacgtgcgactttctgatcgaaattcaatataaatccctcaggcccaaggacgtcaatgccagccgggagcttggcttcgagatcttggacgagataggcctcaattgtcagtttggctgttgcctgtggacctatgaagtagacgtccaactctatccactcgttcgatatatattgggattttatgccgctgaccgaaattggttttggcagcattgtgactagggtatctatcttttgagctaccctgagtcgataagagtcatcacgcatccggaacctaaataagctgtaatgcattgatcctaaagctactgtagccgtcgcatacctccaggcacgaaaagcgtatcctgggctatgggctttgacgcggttagactcatacaaggggagggagccgtcaaacaaagctggggctacttctaaggtcgtcccagcggccggcgacttacagccgtatagatttttatagagatcattaccagattcgaagctaaagtcacaattcaaacaggtaacagagagctgggggtggcaaagctgtgccgtcgcccgtaatatagccccggatcaacttcacgttccgggacgggaccctgcggcgcgtggtctggtttgcatgtgacttccttctgacgttaaatagcaactactacttctccttctcctaagaatcaacatcctcttcatttaacaaacttcaactcacataatcatgcttgcccgtcttaaaaacatattcaccccctccaccaatccttccgtacttcttgttgttggcaagtttggtgctagaatccatgttcttcatcttatacccgaggacggcaccatcgaacgcttttgcctcgtaatgccatcttcgtttactaccttccgctaccgtggagccagagagctatcgcgcgagcagatcggcacagtcacgcttgacgttggagatggtgtgattggtaataccttcctcgacgacgttaagacacgaatctacaagctacagaatgattccctaagctcgagcccggcgcagctacagacaggcagtactgaggtaactcagctcgtgcaagacgtccttcggcccgtagcactcgatgcgattcatgaaagagaggggcgagatcgctctatgcgcgcgacagagacgtaccctgtttttattatttacatcacacgcagcccagggaggagttttcttgagatgacaagctatccttaatgagattccatcatgaaagagaggcgagatcgctctataagcgcgacacagacttaccctgtttttgttgtttacatcatacgcccgagcgcagggagactgactgagctgacaagctatccttaatgagattccaccagttcttttgctcaatatatgaatagtagttgtagtgatttgaaataacattatatgcatcacagcaatatattggcacaatttttattttgtatgtggcttgcttttttacaattctgtatgaatagaagtagttgagcatgtaggtagtgcagctagtcaatagagtaatagcatgcaatacttagtctctatatcaataaccattgaagccttgacaatgaatagttctcgtactcaatgaactatgaggcagaactagtcttttgtgaaacatctgataggccggtttcaaaagtccatttgcagttattgtcgtatccctgcgcgattctctcaacatcgacgacagcatcccacgccgccaacgtcctcctatatcgttcctctccatcctcgacattgacagcgtccaggtcttcctggcgcccagcatcgcactcgcagcgcaaaacagacctcagcacgtctagcagttccctcctccacccaggttgatggcccccggacagccgtgccgcgacgtactcatagtacgcgggcatgatgttggccatctcccagtccaggaaacccgtcaccgcgagtgtgcacgggtccacgaggatgttccggtcagacaagtccccatgcgagaggacaggacggtcccaatcacctgggccggtggtgtcacgctgtactcgctcaagggcgactgcacgttccgcgtccgggtcagaggcctgcagcgcgcggacgcgcgagtcatcccactctgagcgggaggcgcaacatacatacgtctctgtgccaaattcggagaagaggacgtacggctgccgcgtaggccggccgtagtaagaaaagtggtgcgtacgcatacgcacgaggagacggcagagctccgccttgatggtctggcgctgtagaagggtgagagagggccagagctcgactagcggcgtgcctggctggcgaatgagaacgacgccctgttggatgcggttgggcgtcaaggcgttggaggttattatcggaatcgtgacgacacaaatgacgcgtgggacacagaggcccaagatggaatgggcgagcgcggtcatcttgccttcgccatcgtcagcgcccagtttgaggatggtagagggagaatgaataaaaaactgccgtccaatatttagaatagtcggcgctgagaacagagggaggctggggagaaaggcccagttctcccgaggaagctgctctggttcctgagagctctcgccatctagtgtcattttgagcggcgatgcgtggggagaagtccagagtatcaggcaatattaagggtttacttagttaagtaacctggtgctaaagtgcgatgtcctctaagataattgattgattgcggagcgagcgaagcaagtataaatcacaacgtcctatgtacgtacgtatcacgtggctaaattacttatctaggcccttctacgcatcacaccagactaataatgaagacaagagttctttctcggttgtagcatttgtcttgtatatattcttatacaatagcgacagtcattcattcacgactatctccagccaacagattgatttcttgccgtacgaagcaatcccacgaggaattgactgtctagcaatattcaacccaggcatcgaggttcatgttcttgatgacagtcgagaacttgccggcgttggctgcgttgcaggctgatgtcttcaacgtagaggagagaacggctctagctcggagcttgtggtgaccgtgtccgtgcccgtgtcggtgttttttctccttagtggcatcggtgctagcctcttcctcgtcgtcttcgcgttcgtcatcttcatcgtcttcgtcgtcgtcttcgtcatcatcgttagtgtccgcatcagtgctgctagtattggtgtcatcggcggctgtgctggttgcagcggcagcggcagccgaggtagaagaaggtatgacagcaacagtggctgttgcagaggcagcggcagctgaggtagaagaagggatgacagcgatagtggcagtggcagtggcggtagacttgctatcagtggaagtcttggtggcagtatcagaagtatcgtcagagccgtccgactcaatagtctcgtcggaatattcaatatggaaaacagactcatatcttatcaatagatgaattgccgcaggactgctcgttgtatgatgctatcctaagccgcctactattcatgttcgtcgacgtgatttgctgttttgcagatgatcttggaggccttgatgccgtacgtgatatcttatcagtatgggtgcgtatcggatcggggtcttcacgctacaagcttgtttatcatctaggaaagtggctatatcggcaagtgagatcaaggcaggtacaccgtttatattctcatattataacggcgcagcaccccacagagtccaatcaggtctgttatctaaaattgttctcattaagctaaaaattatactaggatctttatagcatacggtaggcttagacctgacagcgagagtgaaccatttgtctagtaagtaaggtaggacacaggttcggaaggctacgaaatctagaaaagcacagatcataagagagaggttgaagagatgtgcgactagaactatattagcgtggatccctgaatcatcacgccaactcgggccacacgcaacaaaatgtcccctaggttggcaagtattgcgccttagtatctgagaacataagaaccataagctgtactaccctaatataacttagttagatcttatattaaagtggattcagaatggaaaatcacctcagaggcactgggtaattagctgtgaaatttctggttccacttgcaataataaaggactatcccggtcagtgaacgacctctctagggctacatagcagctatagagaatgggtataatatataatcttatttggtttcctccatttcatttgcagcacattaaaagatctttgccgctccctagtaatatgggtattgaatattaaggttaagttctcccaggtcttgtggcagtaagcttgatgggggaagaagatgatactattatgacccctctggtgggggtgccatggctaaactatgactaagcaggctaggcctgtgacaggtcttatatggaaattgagcgcggagtgagactagtaagctcacctcagaaggtgaccattttattataactttaggaggaaactggttagaacttatcgttaaagtacctaggtaggcgcccttgattataaatcgctggactcgttataggtatctgtacagtcaaggtaccagtaaaggaaaccttcgataactctgagagttatattcttcagctagtattaagggtctagtgggataaggcgttagataaaactatattattagtaatagctgggagaaaatctaataaagcaagattaactaggataaacctactttttgaagttgcgatctatatatcctgtcacgattggcacttgcgggactcgtactttcccgtttgggattgtaccgttggtcgtttgcgcaggcagtcgcaccttccttctgggggaaacgagaatagggctttgtccctaaaggggtataaaagcctatttgttgttttcacgtttgtttcttttcttttccttttccatacttgatattcgattagaaatgcacttcttttgttaaaaggaatctggcacgcaannnnnnnnnnnnnnnnnnnnnnnnnnnnnnnnnnnnnntctttccttcccgttcgaaggaactcatttgcgcagacagtcgtaccttccttctgggagaagcgaggatagggctttgtccccgaagggatataaagacccatttgttgttttgcgtttgttttcttttcttttctttcttcatacttgatattcggttagcaatgcacttcttctgctagaaataacctggcacgtaacatatcctacggatttcagtatagaatcggtaaaatccgcgttaacttccggatcttcttattagatgaataacatccaatcggttttattaagcttagcttcacttttcttcggcattttgccggtagtatagttcaatgttattagaaagtagaacggccacgccgaagatatggaattgtttagggatgatatctgaacgaggacttagactgcctttatatcttttatccataatgtacgcgctgagggcgttgatgtatgatgaatacttactcctgtaagggcgctaaacctaatagtattatattcaatgctctaacgtgagcgctaggtgaaaggaccacgatttcccctcgaaagaccacacacaaatgttgtcttttcgccgtcaccccgacttactccatactatacagtggagtacccgtgacgtgcatatggtgaacctcggaaccgcggtttaaccgccgttatctcttatcgtactcccctatcgacaatctgtcacgtgtggccttaatccaggtggcctgaaagtaaccgttacacttccaactatctacgctcagcgatgccaggggatgagttgtcagaggatcacctgtatgcccggaatggccgggatgaacatgaagcccaatccctcctgtctgcttcaagcgaggagcatgacctagctctccatccggagcctcttccgtcgccgatcccctcacataacgcgacaagtagcatatcccactccgcgatttctcaacctgcaaccgacggaaagcgccgtacaccccgtaccatgaaccgagttcgattcgacctggacgaagaacctgaaaacaatcgcatttccattgagcgtactctcagcccggacgacagtccagatgacacactatggctggaggacgaggactatgaacttggaaaccgaggcccagggacacaccacagtggacaatcaattcctcttctcacaaatatcgaagcgcctagtgtgacacttgcaacgtcggacgatttcttccccgaagatcatctcgaaaatgcgcggccgcggagtgggatgaaaatggcgttcatgaacatggccaacagcattatcggcgctgggattattgggcaaccttacgcgctccgtcaagcaggcatggcgatgggaattgtgctgctgactgccttgaccgtcacagtggactggactattcgattgattgtggtcaactctaaattgagtggggcggattcctttcaggcaactatgcagcattgcttcgggaagagtggtctcatcgcgatctcagttgcacagtgggcatttgcattcggtggcatggtcgcattttgcattattgttggcgataccattccacacgttctaggcgctttatttccgtctcttaaggatatggccttcctctggcttttcacagaccgcagggcggttatcgttattttcgttttggtagtttcatacccattgtccttgtatagagacattgctaaggtcagctcgttccttccttactatttatcatagactaacagtcagatagctggcaaaagcatccgccttggcatttgttagcatgatagtcattgtcgtcacagtcatcacccagggctttcgggtcccgcctgaatcgcgtggagagatcaaaagccacctcgtattcaacactggcttttttcaggctgtcggggtcatttcttttggtaagttttagctgccctgtcaatacttggaaagcttctaacaatttccagctttcgtttgtcgtatgttcctttttatcctactgatatcccaaccactaatttccacagaccacaacagtcttctgatctatggctcactgaaaaagccgacactcgaccgtttcgcccgagtcacacattactcgacaggaatatctctggtgatgtgtctagcaatgggtatcgcagggtttctgtcgttcgggtctaaaacccagggcaacgttctgaacaacttcccatcagacaatatcgttgtcaatatcgcacgattgtacaatcttcccattgatattgatatagagattcttgactgacttctattagctgctttggcttgaacatgttgaccacgctaccgctcgaggcgttcgtctgccgttccgtcatgacaacctactatttccccgacgaaccacacaacacggttcggcatattatcttcacaacggcgctggtggtgacttcgatggtgttgtccttgataacctgcgatctgggaagtgtatttgagctcattggcgcgactagtgctgctgctctggcttatatattccctcctctctgttacatcaagcttagcagtgctacgcggcgagagaagatcccagcatacctatgtatttgttttggtgtgcttgtgatgggtgtcagtgtagtgcaggcggtcatcaagatcattcgaagtaagtgtgtcccggaagatggttgcaattggacccagttgatagctatttggtcgcatcctccgcaaatatactaacattgaaatttgcagatgatggcgaggcccatagttgcagtgcacgttagagggaagggattcctcaaggactttccacagatagcggcgacttgtactctcggtgtgctcgaaaagcctcttggagccgtgttgctatgtatatatgtatccattttgaacaaatagctgtttcctatcataccctacaacattctccttcacaaatggctacgtgccgtttttatgtagaaatggattgcgacgtctcaagatagctagcaggtagtttgatggatactgtgtgcccaggtgagcagtatgtatatactgtgcagttagactaagtacggtgaagtatattctaggcacgtgcactttgtgatttaggtatcgcaatccgtctgcttcgtttctcattttctactactccgctcactctctacatccccaaacaccacgatgattattaatgtcattctaacgtatatctataggactttactatgacgtgtatacgtgactcgcacgtggccatctcgcacgtggccatgccagatcctaaggccaaaagacttccacagaaggtgcgatggacaatccgcgcaacatcaagaacacactatgcagcctcgttgctacccaaaggagcgataccctcatatgtttgtgcgttcacgcatgcgtctttgatccaactggctctgatcgttcctttatttacctccctgccgtcttctctctttcttccttctacaaccactctctccctgtttttctcttcacttcttctctcgtctggagcggctctcacagttctcatctcgggtgctttgctcaaatctgcttgtccgtctctgtttctttcgctccacagagtcccaagtcctcggagtatccccattggtcgcctgtcccttagggaccttgcttgtgcttctcaagcttcattttatctttgtccttctttcgaagcctccaaggttgctttgacctgcagggacgttctctctgggatacaccatcgcccacgctttaaccttccctcccactcactcctctcttaccttcgcgctttggccaaccgaggcatagtactaagccggtaacacgttgacaacgacgtgtcgcataagtgcatctaatatcctcattaccgttgttcacatttcacccgccacgggaagtgcaccggcaagatgagcgagtccgcggagcagctccgccagatgcaactgcttcaaatggtaatatctagcctctcactcctatctagcttccctaactgactgaatcaataggcggacctaggaaccgctcggcgtgaaatgatttccacagacgagatcaggaaacaggctcgtgtccacattgccgatatcgaatccaagcgacggcttgatcagagagatgaagctcaattgagcaaatgggcaagtaagtactgagaaagaaacgcccttgagcccctctaggattttactaatctttgtcgcagatttgcatgctgagatcggagatactagtggaatggaggaactcgatgacatagaatgcggccagtcccaccgagctaatttgcacgcgatgttgcaccccagtggaggtcagccgcaaacctacgcaaaccacctttacccaactccatctgcaggtcgcggtggtggtgttatgggaaagagaggacgaggtggttttgctcctctccccaggggacctactaatcttcccccaatccctccaaggtaagaaattgatttaccccgacatttcagacatccaaattgacggtgaataactcgcagaccctcctttcatggaaatgttacacttccaggactcccaggaccgcgcggtcgctcggctacaatgtcggccagcattcatttggaccctgcgttaaactgcaacaacgatgacagcgatgctcgagatcgaggaaggggacgtgggcgaggcagaggcagaggaaggggcaacgcccaagaacaggttcacagtacgttttgatcacgggtacagaaatagaacacagctaacaatattcttagtgccgccttccgccatcaggcctcatcgggcatctccagcgtaagtgatccggcttctttctcttggtgagattaagatgctaacttcttggccagcgtcaacttcgccactaaaatctctgagcccggggacttcatgtccttatttcagtcccgccgggcaactgaaacgtacaagaagcctaccgatacaatcgtctctgctccaattccgaagactacatcttcgcaggaatccattccacccaatgtgccaagggtgaaaatgcctccgagcgatacacccaagaagaaaaaggcgagcattcttccagttgcgaagcctgcatcatcgccagtggcaacatcgacaacgccatctcgggttgttcctattgagacgactacatcgttccaaccctccacggcccaggctactactggaaccaagaaatctcagccacatattggaccctatgaggtggagacgccctcacggtcagcccgtgttgttcctcttgagaggaccgcatccttcaaaacccgcaaggcccagcctgatacacccaaatcttctcagccacgtaataaactccctccagtggaagaacccaccccacccccaccccattcggtttctgtttctgtcaaacaaggcggcaagcccaaaaaggcgaaacacatggtgacggattctcagcctcttccagcaatggtcgcaactgccacggataaaattcaatggaaggttttgcctggcgaggagccacgaaagaagagcacggctcctccaagcaagacggcagtctcattggaaaactctatgcccctcgctgaggccaagaagacacccgtcaccaaggtcactcaactcaaagacagcaagcagaatgttcagatggaggaaaccaagcataaaccccaatctcatgatcttcttagcgatgacactccggttatgacaacccctcgccatttcaatacagtggccatcaagccacccgtcgtcaaggtcactcgactcaaagacagcaagcagaatgttcagatggaggaaaccaagcataaaccccaatatcatgatcttcttagcgacgatgacgccccggtcaattcaacaatgataacccctcaccatatgaacacaatggccgtccacagtccaggtgctgcagaattggcaggtctgaagtttgccgagaaggtcggagagtcggtgccatccaagagcattgacggagtcattgcccctaaaacaacgatcaatgattcaagtcgagaacttgacggcttcggtctatatggtccgaaaattattgaagaacttcgcgacattcgcaaacacattcgttcgccccaagagttggctactgcacatgatatcgaacgcatactggaatctaaattgcttcagttgattcctgaagcacctccaccgcctacagcacctgcatcatcggatatagaaggtcggctggggaatctgcttgcacttgtggaatatctttccgcatcgcagcaaggaactaacgctgttgaaatttcttcgactgcccggcgcgatattactccatttgaggggcaccgatcgccgcctcccccttcgtctagttcaaactcacccccgtctgccgataaacgcgcgcgcaaggtacatgtgcccggcctctcgccaaccaatagtgagagttccgacgtaatttcacagttcgagactcttcaggtttcggacaaactcgccgcgcccctccaaccgcagcgtgtggtcccagtcccagctcttcgtccgctgagaattccgaagaaggctactacatccgatatgtccgttcaggctactcctgctctgggatcacgtgcaaaggaatcaacgaaaaagccacagactctgaacgattcgatctttgcaggatctgtaccccttgtcactcccaatgctaacgttattgaacctaatgcggtgcgttcccagaccactggtcgggtgttgagcgcaaaccatccaaacattcccaagcaccaggatttccaggcaacgggcgctcgtacaatcggccctgcgccatacaaaccccgcgtgattggacctgcaccctctgcctatgagccaaccacgttgcgcgatgtgccaacagcccacattcgtactgtttccgttcagcatgctaacactgagaatcggccctccttggatgttgcaaaccgtgcttcgacctccatgggttacttcaatggcccagcttcccagcaagctccgggtgaactgttctccatgcctgaccctgcgacgattctccagcccaaagcgaaggcggctggtttcttcacttccaaccaatctcgccgctaactagttaatggcttctgttttccagagtctgagtttcagtggatttcttcttctactagcctcagccagctctgatcatctatggtctctacttcagtttcattttcgtcttttctatggccttgttgagctttgagatctttgctttccctggctgaatggttcctatttcagttgttcaattgttcaaaagcgaaaggtcaatgatcgtttaacgggtcttgcgtgattatcagatagttgaagctctaatcaactaattgttgtttttttcatcacttgatgtgaatgtaggtagttcattagggatatgagccgttgagtcagacatgcaataatgcagaggaagaaagtaaagtgctgtaaacatgacctatcactacgtaggtactctatcatcatacagcgcaaaattacctcgctacaaagaaaagaaaaagcaaacacgtttcagattaaacatccgcctagactattgcacccaacccgaaataaagaagacctacttccgaggtggacaagttcggtatatccgatctgcattagtcggggaacatgcctcccgttccggtcatttctaggacttttgcactcgaacagacctgtcacagtactttctttttcttctttcttttctttttgatgcactgctcctcaatgcagacacagcggtcaggaacggaacccggaagttcaatcggggaagacaaagcgacatccggtgcaaagtacataatggccaaagtacataatggccaaagtacgtaacggtatatattgatatcgacatgtagacttgacgaggtgtgatttgcacggtctttaaagaactagcctttgctatttgtgatatgttgaacttgtagtatggctctatagcatgacgtatcaaaatcctagggttgattctataatggcatatagatggtcttgtggagatctagttataccctgtcaccgaattatcccatctagatatcttaactcaattggattcagtcaggcacggctctgatgggttggatataagattacttgccttcgaagctatatgatccacgcctatacggctgctgtacatcttggccatatgatcttttccaagtagggatgttgatcatgattccctagagagattacgttagaaaatatcatcaaattttactagagcctcttacttgtgtaactgtcgagtctgtggtatgccctcgctctcgatgaaccctggagtatagaaaaacagaggccagagcgaagaagacgagactgagaccggcagcaatagtgtttgctgctcgaaaaccggtccaggtaagaccaatcaaggaagtcatctttactcgaatagtatccatgagcagtgtagtttgacaatgaagagcgatattatgtctcgataaacgtggattcattcttctttaaatatactcccatcatgatatgtgacaatcaccttcgcacaagtaacaagtcagtagccctagtctactactacccatctcggacagtgcaggatatcaatatcctccaggcaccacaaaagcaagaagccggagcatagacgccgatcagtcaactcgtggcctctaccgatcatcactcggagtgtgtaatgcaaagaagaaaagaaaaacaacattaataaaaacaaattgcaaaaagcaaagaaagtaaaaaaaagcaaaaataccaaatcgcgccgcatccttgagaaattatgccggctagaattccaccgtcctgcaggcaccgccaagaaaatcgagaactgttcattgggccttagaccttgtgtttcctgagctgatgcaccaatccgttaatgccagcgtaccgacaacgcgggctatgggaactgctatccggtgccgcgggctggcccttacccatgcacatatatatgcataggggaacacccgggtgtttcttgtggttcgtgtctatcagggtctagatacttgctgtcatctgcgattggttctggattcgttcgggactttcccgctagccttcgaagcacggcgggagtagggacagaaggtcccggtagacgttctggttctgcttgcctttggcatcaggcttagggccagattttccaatccctgttcgtaattttgtatcgaaatgatgtcaattttgttatgattggtatttctgcggatcaacataagcctgtggtctaagcctgccattgtgttcctgaagtcctgcatgctccagattcggtttaggataacaaaatagaatatgctaatgtgaaggaatgtatcgataatcagtatccccgtccggtttccccgaataggatcctgtgggtccatttgcttcgaagactccggaaggcctgtcatacttccccgccgtgataaccatattatggcgccgtaggccagaggtgaagctaaaacgaaatttcgatgaaataggaacgcttgtagttgaaattgcgcattgatgcactctctcgggtccgaaagacaaatcagatcatgttcattactgggctagtgggcgaggcccagaagaaggcccagggtcagcacctgagactcgaggccgttttgggtcgtttggacccagtgccgggaccccttgatgtgcgccagctgttccatcggcattggtgacgtccactaatggaggccgttttccgttgaggttattctggggtggcatactgcctcggttcatcatggcagggttggaaacgttcctttggtcaaggttgggccgggtcaatggtcgatacgatgagacagaagggcctctgccgaccggactgctaaccccaccaccaggagcaccgattctgcgctgcagatccgttgcgggattgacaaaatcgcgtgttgcattatttttattaatggtgggtgctggggaggcgctcgacagcatcggcctaggaataggaatgcttttgctgtggtctacaccagcggttttgcggatggagggactctcagcatgtggatcgaattgaggtacgcccgacgggacggagtttggattttcacggagaaggtccactgctcttgcagaaaagaaacccgttgacggtgtgccttgcggtggtgggttcatgtcctcggttttctgaaagccgccggggccggtttccttttgagtcggaggctggacgatgtttttgtgtggaggatgctgaccaactggttgctgtggtgggactgatggtctagggttcgcaagattttgagcaggaccttgagcggccattggtcgaccttgtaccgcagctggagacggcatagtagattggttctgtcgcacatttgagggattaggtcgtcctgcttggcccgcgccgttccatcgctctggttttgatggtgttacaacagcggggttaaatcctgctcgaacaggcggtcctcgctgaggcgctggaccgttcgttggcacggtacgctgctgttctcgaagaatctctgtgtctattacgatctcatcaggattgcccatatcggtatcagctaccccgaaatcggcttcatcaaagaggtcacctaaaaatcattagccggagttcaaccttatgtattctaatacatactgccaaactctccatctccatcaaaagaaacattattcccagaattatttcctctcgcttgatgtggcggaccagggaggggtagatcatcctcttcgggtacttgcttgggtggaggcagcggtttcttaagtggcgcgaagtccgggtgacggtggagattttcaacgtcccatcgtccctattttgatagtcagctggcacatcgcaagttggaggacatcggggaccttacaggcgctgccttgactttggtcaccttggccacataatctttgtcatagatacagttacctagcacgttgccaaagttcctcaatgcacgtttcaaagcatctgttgtgccttctttcttggccttctcaaacgctgcggccttgcctttgcagttctcgatatgtccgtagccaatatcctagaagagggctggagttagcacaaggcccacgagaattcatatcacgaatatgttcctttacctcatgaaatgttccatctctcaaggtcactctcatgatgactgaaagtcccaggctgatcttgcctgtgttctgattttcctcaacctgataagcgttagtcaatccctatgtgatgtagttgataaacataagatcaacgcacaaaatcaatctgaatcgtctgaatcgaactggaccagccattgaatccaaacacttcattcgcgagattaatgcatttgtccgcggagagatagtgcactttttgccccgctgcaccaggtcgcgcagagatgtattcgggtcccaatttcttatcaagacgcgcttgtagtgttgcaatttcctgtgcggtgtattcactgatgcggcgttggggttcctcaaatgggtttgctttagcggctcctgtagcgttcggcatcattatagatcctgcattaccccgatgctggtcaccaacgctgagattatcactatcagtgctcggttccatggggtatagtatttcgggtccggggtattggtctcacgctggcatgttttgttgtgaatgagtgtcgagtttgatattagagatgtactggcgtgtcgggcgcgttgtcttgaggcaccaggacgcggctcatcgcgatatcacatgatgataacgcgataagataaagattagagcttcagtaaacaaaacactgataattgatattaaggatagttggagattattaggtatgtggttcacatatggaagctaccattcggggtttcatcatttctcattctttgcaaaagctatctatcccttcggatgaggaagggtatgccataaatcattggatgacgagactggcactgggcacaagtcctagttccttcaaagtctcgccgaaaaactcattatcaaatatcttcttggggaaagtctgcacgaagctctggacctcgatcccatcctgttccctcaatgcggccgcaacctcaaacaacgtggtgtcgacgggcaatgtcttcatgacgttacccttggatgactggaatcgcagtcgagtttcggtataggcagaggcaggtttagacgtagtgggaccggaggaagtgggtgctggagcggcagcaggctggggaggaggagccacaccggcacgctcagctcgctgcttctcggccttcaatcgacgctcctccttgtcggcctcgattttcgccttgatacgttttttggcatcgatttcatcctgcttctccttcttcttcttggctgcctccttcaactgttgcttccgctcgagttcctccttagcatcttgactttccttggtgctcttccttcggatttcctaataataaaagtgagcaaaatacctcaatcgaccaaaatcaggaatacacacctcattcttcttcttgtcaatcttgtcctggtccgagagccctgcgcgcttcgccgcaagcttctcccgcagctctgtcagtctctgcttcttctgctcctctgtcaagggagcaatctcctccgtagactcagcaaaatcaacatgtcccgactttgatgcgtggaactcggcctgtgactggcctcggaacttcttgccacactcgttgcatactaagctgcgtggttgttcgcctggttgaagcgcagggttctcttcgtcttgtgctgctttcgtttgtgccttaatctcctccaatgacttgtcttggttgtcctcaagccactgtagtgcaccttgcactgttaagtcagttagcagatacccaactatagatactggggaaacaaaaacttacagccaccagtcttcgtcactgcgagctgggcgcgctccttgtcaaagcccatttcaatgagctgatccaagtccgatgccatgacggctgttgggacgtgataaagatgtaaatgtaaatgtaggacgcgctcgaaaaatgagcgcaatttggcaagattgaatcagataggtggttcagatgtgagttaggtcgcgagaacagagtgggtgacgtatcagaaaggcggcgagcgataaggcccacttaccttccccgggtttctatggcatcaagttcttcttgatggcgtgttttgagggatagttcgatacttgtacgccattgaaagggtgataatgccaatttcatgtttctatgatattttcgacttgtactacctatgcacacgtgtcgtagttatctatttaaatttaggtggctgtgtggcttatagagccgaataaacatgcaacttgaatatagtgttgtgcaagatgtatgtatttggcgaaaaccttcaagtaacatataaaatgtaaaatcaggctaaacggaatacgaacatgtatatatagggagggactagcatcatataaaccgaaagatatatctgctaaggatgcgtgtgctacgagataactgcattgaagacattttatatattactatatttcagcctccgagacagaagatatagactacaatatgttagcaagtgacgtctattaacatacgaggtcgaagccagcgccaagggatatgatcgcatacctcaatagcatagctccatgcatggcaaccagggaaataaggcatatatacaggctgatcccagtagaaagttcagtgaccaatgagcaaccaatatgacgaaatatatacaatttaaacacaagtgggatttgaccccactgcaagtatcatatgcgggtgaagatgtccatctgaggatgcaaggatataagagcatattagaaaagagtggtcgaactagatatatacttctcatagccaatatgccaatagaataattaaacacgaagaaggaacttgcaatgtggttatagcctactccgtagagcttgtcaatagtgacatcacctgactgtttgctgtttgctgactcatctaatttccccgtgcctaggtggacagtaatcaaactcctgaggcatcttagacctgataactccctaacgcctttattcccaatcggaacctaatcgcgtgcaatcatccacgcccttgtcatctttgttcccttctcccacctctgtcaccccgaccacgtgcatcatgaccatccaaatcgagccctccgagttgggcttcaagcgtgagtgctagaccccgaacctgtagacctgcctagatcacatctcatcggttgataacaggtcccttcaatcatgaagtatgccaggttctccgcctgagcaacccgaatgaggaatctgtggtcttcaaggtatgtgtgacaaaccccctcccttgatctttgtcgcagtactaacatgtgtcctcggcgcactaggtcaaaaccaccgctcctaagcagtatgtcccgacgattgtctgcgcaatgcctatactcgagtttttttatctgatcatattgtagttactgtgtgcgacctaactccggccacatcgaacctggcaaaactgtcgaagtccaaggttagtcgataagcgagtacgcctgaattttgcggcgggctaatattatccacagtgttgcttcaggctatgaaagaggaccctgctccggatgccaagtgcaaggataagttcctagtgcaggccgtcccggtctcacgtggattggaggatgccagcgttggccagattgtatgtccagagtccagcatggagaacacgaagatcaataactaatattacatttagttcgaccaaactcccaagggcgacgtggttgagcgcaagattcgagttgtctacctagcaacagatgccacttcagccaacgaatcggtattctccccagcaatcacttctttatacacatagtctaactttcaccaggtgcatgatgaggaacctccatcgtacatttctcctgccggcgcaaatttccagaccccggcccccaagaagattgactccgctgaaccgtccccaattcctgctcccaatttctccgagaagaagtcccagtctccccagcgcgagccgcaatctgctatttcaactgccaggtctgccgtgggaagtgctattccctcaaccgacgaactcaagtcccagctgtccgaagccaacgcacagatccaacgactgaaagaccgacttgcggatcaaggactgcggcagcggaagaccggcggagaggctaccggtaaagctgtgcctgctaccatgcagcagtcacatgcgccaacggcgagtggagtttccatccaggctgtggcatctctctgtctgctcagcttcttgatcgcatacttcttcttctagtctggtcttctgtttctcgctttctcgcggtctatctggcttcattgcacctactctccgcgtactaaatgcctcccgtctaacgtcgccgacgcccgtcccaaattcccatctactttttgtctcttgaagagagcatgccgttttctatctgttctagcatcagcctttttatgcgtttgctttaaattcttctgccccagtatcaatactctactttcatgttgtctctctggacttcttcccttgaggccggacatatgtctgtctcatcctctttgccgttgctttcctttgttctttaccattcctgtcttgtctaatatcattttatgataaaacggacccagcctttcgattcgttcgccttgtttcataacccattctcgagctcgggataatacatgtgattgctactagagctaactccatgtcgtatgcagttcgggacgttgtctcccttcttcggtaattggttgattgaagacattcggtcctgtctttgcgcattaaatggtcttgttgacacaggcaccggacatcatctcaactgagcgtaaatctaccgagactgatgcttcgtgtttcctacaattatgaagcctgataaaagtcacaaaatgacagcctatttgattgtaaacaaatatatctaacaagtacaagtactccacccagtaatgtatgtaactgaacacctgaaaatccaaaaccaaacgttatactcaaaaagcagaacaagatctaacattgaatctcactctccttccagccttcaccctcctcgcccgccggacccgccgactcagccgagatgccctcaccaccacgtccattccattgcttagacgcagcagaatcaccaccgcgcttcgtcccaccgccaacaatccgtccaccctgttcgcgcttcacacgacaccacggaccgacatccttatccaggatgaaagtgtaaataacccaaacccagctccggtggcaaggtagcggttcatagaactccctcgcaatctcatgcagcttatgcaatcgagtccaagggatagcagggaaatcgtggtgctcgttatgcaagccgacattgtaagtgaggatattgagcgggccgtagtacgagtatgtctccgggggaggcagagagtcgagcgggtgcgggaccttcggcttctcgttctttttcagctcggtcagggactctgtaccgccgcccttcacgttcgagaagaaatagtgctccgcgatgaagtggcctgcgcaggggtgcagggatccggcgaggaatgagctcaacacgaagtatagcactggctggatggagccgcatagtttgcttagggcgtagtcgaagcttatttggatgcctaggttcaggaggtggatgtaggtgaagggtgggctgtagatgaacattgggcgcacggcgtagaagaggatctggaaggtgcagaagaatgttttgcccaggagggagtttaggaagaaggcttccactgctgtggggaggtcggtatcgagacctgttacgccgagggatttgtggtgtgtcaggtggtagggctgttagtggtgctgtgtcagttcattgtctgcgttggggcccagctagtttccggcatgtggaagagtatacgtactctgaatgctgcgctgtacggcagtccgatggggaggtttgcgaagatagcgagcaagcggttggcgaaagccgaccggaatgccaggttgtgtgagatctcatggatggcgaggaacaggttctggttgcaagttgcaccgatcacgtatgccgtgaccaggaaccgccaatcgagcattgaggtgctgcggaggagataggcacaggtgagttgtagggacacgacgccgaggacgacccatttggtaagaggctcgggaccacatagtttggtgacctataggtacatgatatcatgaatcagcattgcaattgcacttgttgagactgttcctcgcccaggaaaggtggccaggtgtatgtaggagctccgcagacctccgcatggagtcttcacccagctctcatatcaccccgagggccctcaaaacaggatcacatacctccggatgggctttaataattgcctgtcttcttgagcggtgcggttcttccgtgtatgtccagaagaaatggtcctcgaccaaagcttcgggtgcctgtattctggtagactctggttgtgttttgtcggatgccttggctgccttggttgccgacacgcggagttgcggcgaagttgtttcaacgaccgcagacatgatggaaattggtgtgtgtcgaagtttaggccatgggagatataagaggtctcaaaaaagtcggaagacagttgttccacgtggggcgacgcgatacttgatggcttgaggcttggcaggatcggcacttgtcagggcttttggtctccaatctattcaagacattactaatgagatggatctttgaagaacgctttttatttacttatgtctatgaaatacatcagtagtcgtcaccacggctaataacttccttcacgttcgggcgcaatacaatcgtctaaacaagtcagtaaacagtccgagtggagaaattcccaaaatagaaacatacatgttcatattgggcagtgtatgagcccttgatatcgcaaagaggagggtaatcctgcacaattccagaagaaaccaggttgttcaactatattcgtcagcttcggtgtctcgcattgaacttcatcgtcaacttacgcccaaaaggtacttgtcctgacccaggcggtcgatgtaccggcgacagaagggaagggtgccaaagttcttgttgatcaaatttaacaagttcttagcggaggtaagacgcaagggaacgttaggagcgtcggaggcgagagcgtagtgcgaggtttccatctgaggccatgttagccttggttctcgacctaggacctacagtataaacttacttcctctcgcacgtaacctttaccggtactaccgaaagtctcaatggcgaaaacttcaccctcttccatcttggtctgatcggtgctcttgacgattggtacactcttgccaccgtggatgacgtgctggtcaatgttgtgaccgtttaagttgcggatacacttgacagggtgcatggtgccattgagctcaacttcgtaactttccatagcttcttggatggcggcaccgatatcactcatacggacgtcaattcccgcttcctagaaacccgtcagctctgcctgagacgaagaagagaaggaaaacttacccgaataccggtgttggtggcgtccttcacggcagcgagaagaggatcgtacactgggtcaaaagtcatagtgaaagcactgtccacaatgcggccgttaagctgcgcaccgaagtcgaccttcatcacgtctccctggttcaggaccatcttgttgcccgcattcggggtataatgcgcagcgcaatggttgatgctcaaaccacaagggaagcccataccacccttgatgttatcaccttcctccagacctgggtgacctgtcagggcgcgcaccgaatcctcgatgccctccgcgatctcagtcaaagtctgaccgggcttgatgttcttctgcgcatactggcggacttgacggtgaacctcggcaccctggcggtactcctgcaggaagtcattattcatgcgatcgaggtatcgtttttcttcgttggtagtacggtaggcattgtcgtttaggtattcgacgatctcgccctcggggtattggccgttggggaagaggttagacacaggaacacgcggtggctcgctctggaccttggcaccacccttcttcttgggcttcctcttgggcttcttcttcttcttctttttgtcggctagaggtgaccccgccgttagtcccggtcgacttctgtggggtggggtggggttctggaagcgcggtcacggaaataaacttcaacaaaactcacccccagcagcttcagtctctgcggcaccctcgccgtcttgggcgtcgtccgagtcctcctccgcttcggcgggaacctgatctgccgtgcgggcggcctggacgttcactggtctctgatcagtcacacatgagagaagtaaacagaaaattcgaggatcttacggtctaactgatccaacttctccgtagtctgagctgccatcttgaatgtggcaattgaacaagtcgtatgttcaaaggcaagaggggaatgtcgggtgtcggggaaagagttttgctgataagataagaagaggcttggagatttccttggcggcggatggatgttgctgcctgacatgcctgttgtgttgtacacttcaacacgtctaccatcatgattcatacatctccatctcccgttcatattgccactattaaactatgtcgctacttaaacttcccgctgaacttctactaaaggtatcttcacatctagaatatgtttccgatctcgactccctctatcaatgtcatcctttcctgtatactttgttaaaagacagagtcgacgaacttctgaagacggagcagtctatccagcatctcgcatgggctgcagtgaatgggaaggaaacatgtgttcgcaagctgctagatgtaggtgcgttattcgatgattcgttcgctagtgatgctgcgcctggggatgctgcgcctggggatgctgcgcctggggatgatgagtctagatatgatgccgtaggtatgatgcacctaggaatcataagtccgcctgtcgcaagcagagggatgatcctatgacgatagctgcaaagtatggtcattttgatgttgtccagatgttcctcgatcgtagaagagacccgactccagagatcaacgagtacatctacgtcgaccttgatcaccttgttgtcttcggaaacccattgtccgtcgcagtgctagggggtcatacctcagttgtcagtctcttgattgaacgtggatttatcaaacgctgtgcagaaccccggcgaaaagcggttgtgcgacctatcattatgcttggctgttatgaagaggcatgttcccatcatcaaacttctgcttgcaggaggttgtgatcctaatgttgagtgctctaacaaggccctttgcatcatattgccctagctcctgctacaagcgcaactgtagaaatcgtccgtcttctaattgatgctggggctgaattctggacaagcatgaatggcgacgatccagtcttttctgccatggaaaccggcaatgggctgtttctcaattacaccttcccactaattgagactgacaccgaaatatttctgatgatgcttcatatgttcaccggaaaatacaagacatttacctcgtccctcctgaagaggattgatttagactacacaatcacctttggcgcgagagaacgatgtagtcttctgtgtgtcgctgtaggtggcggcttcccggatctgttggagagaatactattattgaggccttattattcaaaggaatggtcttgtcccaaaggccatggaagtcttatggctctcgctattgcatctggccatatcggaacgatagagttatttctcgaatatcgcgccaagcttaggacggccgtgacttatcccacactcatagtggaagacaatgacggacgctggaacttcgatgattgccctccttcaatgattcttgcgcttaaccgaggccatgatgatgtcgtgaagtacctcatcaataagggctttgatgtcgtatttccgtcgtcacgtcatgggaatggttttttcaacagagcactttatctgggcaaagcggaaatcctccagatgcttcttgggagttctagtccatcaatcgaagatattgcgttgtttggtgatggcctgtcgattcagctcgcagtcttggggggagaagccttcttcaaattactccttgagcatggagtacaactgcgaccgggtcacgttggacattgccgcgcattcgcatgtgctgctttgttagctaacgtgcctaccttgacgatgtttttggatgctggtttcagtctggataagcaggcttcagacaatgacgatgacacagtcggcctgttattggaactcgatgaaaatagaggtgtcacgctcctcgctctcgcggctcagacgaaagatcgcaatgccgcggaagctgcggttgattttttgctagaacggggagtgcagctcaaccagttaactggctcttgcaatcacacgcctttactccgcctagccttgggggtagctggaaataacgttagcactgtcaactctttcgtcgagaaaataaccaagaccaaggtggacgaatacgaggttaagcgactacaatactttgaggaaactagcgactacggattactggcaagacagcttctattggagaagggggccgatcctctatttttgaacagaagtggaaagtctgccttgaccgtgaccgcatggagaaatgatatcagagaggtcaagatgttgctgggatatgtcgatccaaacgttccgatcagtacgatcaattctcatatattgacagcgatggccctgtttgatgattctcgcgacactattcaagacgagaaaagaccctctttggccatgcaaaagactccctggaatatttattggcgcaaggtttacccttgtcctagcgaatagttgaatcgagtacaggtatgcagcatgtagcttggcggagatttcgttgtaaatggcagagaagagttatctgatggtatcaaataaatacgctgaatggctcagggcctaggacattccaaattagctaatgagtcaaaccaaggaagtaaatctgtgttctgatactatatacaattttttcatctcacatgtgacatggataactatagttcttgactaacaggtctcctttgcacccgagccatacgaagcttcaataattgacggtattcggatgacccaaaacacatatccgggtcaaatgtggctcctttgtcaaaaagcagcctcgccattgtatcctttcctttttcgagggctaattgtaccggtcgagagttgccttcaccactagggtcagcaccatggtctagtaagagcttaacagccctagggcggccatagcagacagccaaactcaaaggacagaaatggactgcccttcggtttggttgatggtctttatcaaggacggacgactctttcaataccttctctaaaagatcgtcaaggcggttcacaatcgccccctttaagagatagcaacgttgaagattaccgtacttcaatatgcgatccacatcaatccagcttagcagcaatgaccccatctcgtggttgtcccttggtcgagagaattcccacaagacttccaaccatcccaattgccgccaatgaaggttgttcgctaggaggagcttcatgacggggaggttgtctgatcccgcggcttcgagtaacagtttgtcatatatatacaaatctgcaccagcccctactaagagttgggcaatctccagatttgcgggtgaaggtcttgtagcagcagctaccgctagaggcgtcataccacgcaggtcataggtatcgaggctgcaataattatattcgaggaagagtctgacaattgatacatgtcccagttcgacggccttgcataaaggaattgcagcatgtctatcgtggctgttggttttgcaatcggccttgtgttcgaggagcagtttgactactgcagcatgctcgcttgtgactgcagccttgagtgtcctgttgaatagatctccttctttctcggtgtcatgttgaatgcagtagggtaggaacaattcaacaatattggtgtgtcccttccacgctgcaatccttattggttcttgtccttcgaagatgggaaggtcgtccaatatcttcgagccgcacatctgcaacagtttccgcgcactagcttccttgcctttttcggctgcccaggctatcgacttcccaggtgagtctttggcgatggctttgtaaagattcctgtttgacagagcatggaagtggcggctgacccgtgtgaatgcattgaggtcacggtagtcaaggtggagggatatctccagcagcatctcattagggagctctgaaagagtcgtcatgtttcgatatagtttgattgtattgggagaagatgtgtgtttcaaagaaaaaaaggaccaaatctgtctgtctcttttgactataataccaggtggtttctcagactgaatctatgtgatgggacatcgggggatttatacaggttctccagggacctgctttgaatcgtgttttacgttgaataaagccagtgtttcaagtcaacgccttgttcttcgtgtgtggtagctctttgatccggaaatccaatatagtctcaaagggtataacaatatcgctatacattgtgaaaggggggttggcgcttcattgtctatttatggatactagcgagtacaagggtatatgcagacacaaagcccctagctattccatatccttgtcaaagaaaagcttcaacttcattttcagttgtcttcatttggaaacgatatcaagagtcggttgaaaggcgagattattttaagcgctcaattaaaattcttccgtaatcggattttcaagcccgggagagtgggtgattgcccataatcatgctcaaatagaagccttaatgcaggaactgtttcgtggctgagacgcttgacatgttctgggtctttcatccagtgccgtaagcgccgttggaattttagtgcgaatatgaaacataaggagaagcaatacgcgatgcgccgattatcattgaaggggcccaggcacgggcacgataggattggtccatatatttattacgacttcctaagcgcttgatgtatagttcccatattgtcgggaccatagcaccaataagccctagtctcatttatatcagtcccactttcatactgcttatacaccctattcctaaggcagcgactatcctaagaggagccctacttcatcagctgcaatgagataccaccgaagcgaagctcacagagagcatctgcaacccctataacgaaagaaactacaatctcacaatatgtgctccgtagatccttaggtatccatcccaaaccggccaaggagtgttctcattggatcaaaccgttttgatgcccgaaatggcataacctatctcttatctaatctgatcatcaggagctaactatggggattgcaactgcccacgtgagtgtaggttatattgactgtgttgttcccagagatgaaagagaccaaatagaatacatatgtagaattccccagtagccagtaataaatatgtggtaattttgtacagtcgatcaacttcaaaccgctgtgacgccactgagatcttcacctccagtcttcttccgcttctccctctctccctcttccacccctcccccaacctaccgcggctcttatttctctattgatttcgatgtaacacccccttaatacacgacaatgcctccatctcgagtaacatcaattcttctctttccgcgcgcgaccctctctccctccccttcaacataccggagcatctcaacccaacccctccgaccgcaattacacccacgccaacaacaacaacaattcataaaaccaaccatatcctcattctcaaccagcaatccaacccgggcgcgcgaacaaaacttctacgaaatcctcgacattcccacaaccgcatcatcagcggagatcaagaagtacaccacccacacccacaccagccctcctccacccctcaatctccaaccccatatatctctttaaatacttacctacccaaccgccagacaattctacgccctctcaatgcgccaccacccagaccgcaaccgcacagacccagacgcaagccaacgcttcgcccgcatatccgccgcctacaacgtcctcggcaacgactcaaagcgcgcagtctacgaccgcgaccacggcttccacagcgcgcaccacgcctccccaggccaaagccacagccaccaacaccctatgggcagccacagcagctacgccggctcacggcccgccagcgggctgagcaaacggcgctcggcgttccacggtccgccgcctagtttctacgagcagggtgggtatggtgctacggggaggcaggcgcagggtcgggcgtcttctggtggtgcttcggaattcggggctggcgctggcgctggtgctgggacgaaacaggctgatccggaggattgggaggggtttattcaccggaatccgttgcatcatttcaatgctcagagtcatttccggacacaggcggcggaggataggagaaggagcaataggaggcagggagctaggaggattgatgaggatgaggttgatcctagggttgatcagacggtttcgaggttctttctttgttccgggtgtctaattgttatgctcgttgtagtggacttttggcgctctgttcctagtgctgttgatgggaggaagacgaggaagcagaagggggctttgtcttcttgacggagttgttttttcactcatacttggatacatgtagtttcttggtatatatagtcaagtgcattgctggttgatgtactcctactttggcatatctacgggcacacctcgtagtgctttatcctatacaaatcaatcgaattgatcaaagaaacagttgatttgatatacaaaaaaagtgatcgagcagaaaatctacgacacacatcgttactatcttggacgaactccaccataatcatcgttctggtgaatcagcaagacaagtgaactaataactgaagtttacaataatcttcccaaaagatggtaggccatctgtcaggtttctcggaggcttaggctctagaagcttaagactcgaaggtgaagctggcgccgaccttgtgggcagcctggttcaggttctgggtatcgaaggaagcaccgaggccgagggtgacaccagggcggagcaggacgttgtaagccagagcggcaataccacggtcgttgatcttggcctaaattgcgagaaaattgcgcgattagtcgtgatctacatagttatataagcagtttaaccgcgtgaaacgaaccttagcgaaggaagaggggtccaggcggtacttgctggcgacctcgaggccgacggcgttgccggatgtggagtcccaagaagccttggcaccggcctcaacctgagcgttgacgcggtggtagtagctggcggagaaaagggacaggttgttgctggcagtgatggcagcggagtactgggcaacactgtagccgacggcagcggagtacttggtgatggcggccttgttgacgtcgtaaccaccctcagcaccgacgaggaagccctcgtggccgagaacggcgtcgaagttggcggaggggccgttcagcagatcgaagaaggcacgggcgttcaggttgggctgcttgaagtacaggttgagcttagcacccttggactgcttagcgggctggtactgggtaaggatctcagccttgaggcccttggcgatgttgttgtcgagctcgagcttggtgtcgagagcgttggcggtggtccaagcctgggtgagggtgaggcctggtcggagtgagcatattagcctaatcctgtgtatcttggcatcggaaaaaataaataagttcacccggcgcgctattggaataccgcatcccaacatcaatgacataagacgggccttgtgcgcgccgggatctggaggtttcttctggagggggcgtttaccagtgggcgcatcaacgtatttggcctcgagctataggcgcactagttagtaatttgcatgactggattcagaaatagctttgcaactaacctgaccagcaatggggccctcgtgagcagactttcccttaacggtgaaggtgacaccgttgggagccttggacttgacctcaaggttggctaaaagctttgattagctatttaatcttcaatgagtggcgcaatgccatgcagaaacgtaccggcagcgccgtggtagaagtccttgttcaagagctattgggattaggtattagccaaggttccgagttttgtccccaacagttgtgcgtacatcgttggtcgccttggcgatatcggagaaagcagctggggcagacatcttgacgagaaaaatctaattgaagatggaggaggaagagctggttctaggaagagatgagaagagaggaagggaaggaagagatgtgatgatgttgggggaacctaggggcttagcacgggttagtgggaggtcggtgattggcggttgcccggctgccgggaaagcccgccgggaatgtttgggcagggtatgtcacgtgtttatgggagacattcaaaagacattggaatcataacattataccgactatacaccaaaagggtacacatatacaatctaatccggtgctatatcccccaaagaaaatgctagatcagaagggaaagttcggatccttttgtttacatgctctcagacttttactccaccgacttctcatacttctggttgtggatggcgatggctctgcaaaggatggttagagaaaataatcaagaacaggggaaataatagctcaccttccactgggatcgctctgcttggaccaggtaggggtccatcgctcgacagtaccggcacagtagggagggaagtgctcatcgaacatggtacggtaccagtatctatagctaggttagttttcaatggtactataatatgaaaaaaagaagtgggaaacatacgcctccttggtgtcgggaacatcagtaccccattcggccttagggttcttcatcatctcgtcggtgacctggcgctcggcctcatccttcaggccatcaatccagctgtagccaacgccatcactgaactgctccttctggcgccagaggatgttgtcgggcaagtagggagggtttccaggctcatcggtggtgtcaaaggccttgcgcagcatgtgcttctcgatacgctcgggggtgatcatcttgtccttggggtcaacacccatggcggtctcaaggaattccttgtcgaggaaaggaacacgggcctcaagaccccatgcggaggtggacttgttggcacggaggcagtcagccaagtgcaagttcttgatacggcggacagtctccttgtggagctcctccttgttaggagcagcgtggaagtaaaggtagccaccgaagatctcgtcggaaccctcaccactcagaaccatcttgacacccatggccttgatcttacgggagagcaggtacatgggagtagaggcacgaatggtggtcacatcgtaggtctcgaggtggtagatcacgtcagagagggcatcgaggccgtcctgaacagtgaaggtgaaggggtggtgcttggtgccgaggaacttggcaacctcaagggcagccgcggtatcgggggcaccgggaagaccgatggagaatgagtgcaactgctggaaagtggtgacggtggacagctcgttttcttcgttgattccaaccaactcagcgtccgcgttggtgttctggggaatgttgcgggcagcttcggccaagcgaagggtctcgcgctgggcgatagatgcgaccaagctggagtccaagccaccagacaacaaaacaccgtagggcacctcggccatcagacgcttgcggacggccttctcgaggctgtggcggatcaccttatagtcaaccggggtcgtggggacgttggcagggtcccaccacttgggctcgaagtagcgggtcatggtgtcggtgctcgaatcatagatgtggccgggggggaaagcaatgatctcgtcgcagacggggtgcaagcacttgagctcggaggcaaagtagacggcgccgggagtcgatgaggaccggccaaggtagaagctggtgacaccaatgggatcacgggcagcaacaacacggtccttcttcttgtcccagagaacgaaagagaacatgccatcaaggtgcttggggcaatcgaggccgtactcctcatactactatatatcagcattccgaatcttaattccgattcacttatgattggcctgacataccaaggggaggataacttcacaatcggagtgtgtcttaaagttgtacttgtggcgaaggtgcttgcgaatgaggcggtggttgtagatctcaccgttgaccgcgagggcgagggtgctgtcatcgttgacaaggggctgggcaccggagtctaagaagattttgttaacacatcgatcttcaaattccatccttcatagggaccacataccaacaccgacgatactcagacgctcgtgcgccaggactgaaccacgatattagcataccacgccgaaaccgaagtcattgcgtgttaactcactagtgctctgagcgcagaagtttccacctgtagaaaaaccttcgttaaccccatgatcctcccatataccgcgcaatattgcgactcgggttgtgactcactccaatcgggaccacgatggcgcacactatgatcaggacacgagtcagcattttgttgccaattgcaaattgcagcaattgaaagagatactcacgccttggccatgcgcaaagctgtaggcttgaacttttgcacatcgggatgactataggagtatggttagtattccgcaaattgaacatcccactagaggccgggagttagggtaggacatgacgcactggtggcacgcgaaaattccacacatgatgggcaattgggaaccggggtagagatgaagatcaattcaggaggacagagagaagaagaagaagggtacgggctgaaattgactaatcgtgcgattatatggggaacctctgagcggcgatttttttcaaattgggtgcccgccctcccggcggggcgatgtcggcaagtcttttgagtcaccgataagatagcctgtgggcatcctgggccaattccaagtttacaccaattagcatgtcgggttaagagattttagctgcggtggcaagatctgtcactataggcgggttctttttgccgcgtcatatgactattggagtatagatccttggagaatcatcgattcaagatcacgtgactgatatataccccaccatgaactatctagccctagccaagcccctccttgtccgtttcaggaaactgaaatatatgctgatcatgagcttgtttcgttctacaagcatgtctatggattgcttctagaagcacactttggttggagtttattctcatttagcgaaagcttcttgtgttgttcccctaccatcagcatgtgatctttaacattctttgtactatagagacagctgggaaagccaattccaaggagaaagcgagagtcacaaagacaagatcacattcgtctcgatattgaggccatcaagatctaccgagacaatatctcttctggcttctcattttgggcctcaagagcaggtgtgatggtatcatcttgatcttctcactcaatgctaaaatggtgagtttcaagagacatacacagcccggtgcctatttaatgtgatgtctcgatgtctccatgacggtaccttggacttgcgctagctgtattggcaaatatgacgcagtgttcagtacacaatcctataatgttgaaattccaattgaagaaaggcttcatcaagtaaatacattggtgtcttgttaattgaaagtggaagttaaatgcagctttccaagacacccatcatggactcatgttgcatcagtgcagagaggtccggatattgtgctggctgctcaggtgattttacctcacaggagcagataggtacaacatcaagtcgcctctgcgagggtcatcctgaactcaatacatggcaagcgtaggtatcctggtagggccatgtatgtggtatcattgtttcggaatgaccctaagcccagaaaacgccatccattgggatatgtagaacgccatgctcgcgatagaaaagcaaaagttgctcccttcctttgaaaataaatgcataatcttcccacaatctccgcagtatcccatgctgaaaaaaaaaaaagtaaatgacccatggagcgccatcgctgtttacgcttgggtaactcagagcttgattgggctggtttcctaattgggctggttttccttgacagccatgcgaaccctgcgttcgtattgaggacggtccttcttgaagaggttgtaggcctcggcctgtgcaggtgactcagggttcgggtcgtccaggagatcttggataccgagcaagagctgtttaatagtgatggcaggtcgccagccctcctcctcattcagaattgacaggcaaaccgttccggaagggtagacattagggtggaaaagtgctggtgtgaatttgcctgaacagtcgtagtattagtatgagattatcatgagaaatcagaaaagatcatagtcgtagctcccattccggtatatcgcaaaaaggatacgtacatttgggaggcttggtagggtattctagaagcatggaaagaatgtagattagtatgaggatcttcagtagtgaatgtattgcgccactcaccatcagggaaaatcaagtcaatcttgaaaagtccaccttcccagagagtgttagccttccctggaatagcacattcccagttcttcagatccaggccaccctgcggggcacgtttaggctttgcgacaaagccaaatgggtgatcgcgacgccattgctttctagcgattccatgaatgttagtgcggggaagggcgtggcgcaaaagatgcgctgaatcgcgggatctgcgggataagatatatgcttaccgctcttcctggagacggttctggcacaacgacatctcggggagtgttcagcggatgagtagctgaaacgggttgactggcggaggatggaagaatcaagcagcagaaggatgcaacttggccgaaaatagggtgtaggtcccgatggctggctgactggtgggtaataagagagggagaaagaggtaaggggacgagtgggagattttaaaggtggcaatcgtcaaagcttgggaggtgatagcaattgacctccccacgcgaacaatgagtttgcttatgtaatgcatgcaggccttgtccaggaaccaaccagggagcctcacttctattgttaggtgtagatagcaattacaactggttctgcagtattttctttttgttgtcttctatgtggttataaaattaccacatttgtccagcggtcttaatctaatatcatttgttctacttctccgatagaagtactgctatgtatatgtaggactaaacacttgcactttcagcgtcagtttgctatgacctaatgttgaaaatgtgagctcaatcgatcagaatactgaaagttcaagagtctccaattacagctcctgttctgtgccatgagctgcacagagcccttaaagatggtacctaggtcttgactacaatgaggattcgtgatgctagacggtgctacatttatacctctccttaatattggtacaggttattgatcgtctcataaattttatcatttgatgtatgtaactgcgtacatagagaatgatatgtagaaagtatgcggcgaagttacacgatttgaggggggaaacaagcgtgcttcgcgtgccaacaaagaggagggcgagaaacagacaggagaatcattatctggtctaaagttttacaaattgcagtaacaaataaagtgaggctttgctagtccgtgggcaaatatcaattctttcttgctaagcagcttagtggttacgtacctagccctaagtagcagggaaattataggcggaaaatatgactatagaaatacgtagtagctatgcatagttcggggagtgtggatctcgaatatactaatcctatttatggcatatatctacgtttatactgtattaatatcggtccaaggtatagcaatttagttggtgatatccagcaagatgttcatatagagcagcaagctagttatggacttccgaccaaccctacctgatagaattaagttcctgctattccaacctccataaatatgtcgtatttcaagagtcattatccttcgcctacaaagttatggacaaaggcctccagggtaacaaagagccaaaaatgctctagacataatgccttccacccagaacaatagctattaaaaaccaacgactcagcgagcaaatgtttctttattcgaaccccggccggattgatcctcgacaaaggctctttccaacaacaagtttgccggcagatgccaacatactttggaatctgggttgaggcgtataaaggaggacctgctcatttcatctatcatactcctccgaaccacaatcaggagcccttagtgaaactcctatgagcaatatttacatgaaacatcccaaagttacttactattgtttaccataatgtgtcattccatcgtctggtactatgccctatgccagcaccaagacccggcagcaactcgcctgatcatgtgccgcagagccttcatagtaggctacgagtgtgccgaagcgcaaaacacattctttttctcgattatagggaattgtgcacaatgcaggcttaaccagctgctgctacgccactctgtctttcgcgactggcggagagaagatgttctgtctgcgctcaacggtgcattccaatacagcgacgaagacggctggaatatcgatgacagcgatgccgacgaattagatatggaaacttggattccccagtctcccagcttgactactaggactttcgctgagcgagctgagaaccgggagaccaacgtatcattccacgagggtcccgtacgcacgccgaccatagtgtaccagtcctcgcctcacttgtcttgtgtcgctttggttgaatatgctgatgactacgcagatgatgaagatgttgaagatgagcctttgcaggagcctcagccccagacgagccggcgctggcgctctttgattcctcgtcctactaggttggtgcgcaacgagcagaatgttacatatatggcgttcagcactgatgacgatatgttggacacagagcctttcctcggcactcctaaaccgaagaagtatcatcggacttggcgttcctggattccccttcctgttaagaagttgtcggagcaatagattgatggaatagagtagtaggatggaaatctttgatgtttcataggagattagatgattgaattttgagatgattcatagtctgcattttgttttacttttagagtaatcctaaagtaatcctagggaacatcgcaatgagacttcactagagcaacatcaaatgaaattgagcactatcattaacatagctaattaataatatgaaagggtataaacataagccattggccatgtaaaaccccggtcatactcctcggtccgagaggccttgctatgattttgttgccgtgcaatagtcgagaatgcacaaattaacatataatcgagatgtcatgtcgtataagagaggacgaacatgggcagttagactgtgtaaatcccttggttgaacttgtcgagatcaaaaaaccgtgccgtgatttcgttgccattgaagatccggccttcgagcgcgttcacggcctaacggatatgcaatagtcagcaatgcacaactcacatttgaatcaagacgtagatatcaaaagcttacccgtagaccagacaagggatgagtaaatttgatcaagaccgggactggggttccgacgtcgcgagggatgacgactcgctccacgtccccatactatgagtcccggaagttagtaaaagcacccaagccaatcgaaaaaggaaacgtaccttctctttgcattcatctccaatctcctgtaccaagccaccattatggcttccctctatctccgcatccaggtccataccgttcaacatgccccgtaggatgaccacctcactcatagggccaaacttgctggtttcatattcgcccttcttgttgcttccaatgatcttacctcgcccggcaggtgtgacaaagccaccaccctctgagtctggtcgcttctttcgcttctcaagcttgacttgcagcggcttcaccataccagaaccagtagcgccgaggccggaacccttggtccagccatacttggaaagcagtcgttctgcgaaaccttgttgcccgggacgaagagaccgtggagcggactcgtctggttcttcctcgtctgccggttgatcttgggccaatgcggcttcaagttcggcttcggaggctgggatttcttctgggggtggcggaagattgtatcggactggtgcgcgggatatggttgcagagcttggctggaaggcgtcaagggggcgtggtggtggaggtgggatggtttgtcccgatggagggtcatcggaaattggaataggatcttcagctcggcttggagatgaaggcggaatttgtgcgtgagtagcgattgaatcattgtcgaggcgttgccctaatgctgcacggcgagcaaaggcatcgtccccagatgtgtcattggggatagaagctggtggtggcacgtcattgaggtttggcggcggcgcaaagttgcttggaggcgcaaattgttctggtgatatcttattagcctaaatatcgtcactcatcgcaaaagaccctaacatacgcttttttggctggtcataatcatcgctatcggaatacctgctcggtgagcgcttcctagcaagcgcatacaaggtatccttccactcgcggacttcaaagatcttctcgtcactatggccgtattccgcgcaatttgtaggccgagaagagtcgtagatatcttcccagttttggacaacatgtgtttcaaagttcttcttgcgcttctttcttccaccacgctgtcgcttctcacgggcgtacccatactcgtcatcttcaatggccgtccaatcagccaaagtgctctttgtcggtatcgaagggttagctgagggctgtggttgaggtgccttgggtaaagtatgtttcgattttggcttctgggctgagagctgtggtcttttggggggttggaatcgaagggaggctataaaaaaacatcgcacgtcagcatataccgcgtcgatattcaataagtcgagggtaaataccaggattcagttgttgctttttgacgctcgcgtcatcaggttgaggttctgtctccgcctgcttaaagacaacaggggcacgggagatggtgccaggtgtatcgccagacggatttagtaggttggcatacagggacatgccccctctcggaggagtaggatcagaagccatcactgttatgctatggtgagaaagtggttgtcttgaacgtcggcatcgcgataaggcttcttttatctggcgccgcaactctccgactctccgcctccccaccacctataattgtcacctttaccatcacctgtgccatccttagctattcctcgtctagttggtttctacttggatttccgcaactttgctcaattttccattgttaaaataaaatctgcgcctctatttaaacaagttcggccggcaaaggtcgatagctcaagcccaagcctaagccaaaaccaaacccggacgtggacacgatgaccgaaccaaacaaagcattagggaagccaaaaggggtatgtacgaatgcattgcacagaccaatataaacactatcaggccacttgatttcttagccaaatcctccaatccttcctccgctcttatatcaaatgagtcctttaatactgatatcgatctagtctctcaatgctcctattgcagctttcactatggctatcctccttttgacatactgtagtagctctatccgctctgcacggcgagatgcccaaacccatgttcccggtcctcatcagccacctccacgaaaagacgagtcctgggttgaacaagcacttgaggagagtcgagcgcagaatggtgggaagggacgatcctgaggtttacctacatacatatgtatgttgaagggtgcttttctacatgtattatatggattgaatccactgaacaggtgtttgataaatagattgtgataccaacatgtaaaattctttgttcattcgctcttgttgctatataggtgaaaagagagcagaaccaactggaagtaacatctgcatcttcatattcaatcagaattttcagtgtatgaatgatcatgccccgggagtctaagtgtattgacaacccagttcaatcttgaaattgttcatcatgcgaatagtgaaggaatgtgtgatatgaccaaaggatttgcaaaattgggtgatatgagaatatacaggcacatatagctgcttttcaattgatcaaatagtcgcaaggtcagtggagttattgatttatgtaaatcaggttagtaagtgaagctgattgaaatcgacacctggttgatctaaaattgttttctgaccactgttaattgattccaaagtgccagcattgaacacttgagtatcaagtacagattgatggtttgtcgaagtgaaaaatgtggagggagaagtggaaggaaaagagggaaaaaaaataattgcggcaaatttaaataatgtgtcacgtgcctgtcccataatctacttagcctaggatgcatctatacaacgtttatcatcaacaagctgtgtggcaggttttccacacactgtactttccaatgtaacaattgttaggcttcgcttgggatgagagttgatagtaatctgccattcttgaaaattcgcgctactttgaactcatcaaacttgtcacaaactccgaatacaacgcaagtactccgtacaaacaaggcggaatccaaagagatgggtctggaggacagttaacattcatgccagaggctttgcaatggtcgagatgaagtctgagctaattttctaacagatagcttcaattgaaatatgctattcgtctttcagaatcaggcttgggggccgtttctttatttgaggacatatattcacaagaatgggcaaccatgtagaataggtatgtatgtacagaaaatacatgcagaagccaggaagataatagacaagtcaaaaaggagcaagaaaagaaaagccatgcttggaggtacaataatgttccagctaaaatgcagcgagcatatgaagacatgtgaaagctgtttcacatgtcagagccctagaagtctggagacactgtcatctatgccgaaacgctcggatgctttcagaatgcagtagcaaattttactcgctaaagattgatctcaaatatcgagtaacagaccgcctcgtccatgtctatacaggttgtgacaaagggaaaaagaaggactcggcgatcagaagcggtggggtgcgatgtgataaaagcggatatgaaggaagaggatgaagcgtcgaggttgaaggttgaaggttggggtggagcgtgagggtggagcgtggagggtagaggttaaaggttggaggttggaggttagggttggggttggggttgaaggttggagatagtcttttgtgtgatgatattgtgtcaaatagatcgcgcagcttcttcttccgcctggagcctcagagcaccggcatgctgcaaatcaccgatctgccgccgcaggtattcgtaggtgagcatggtggtcatagcagccggaacggcccggaataggttgacgccgatccctgagtaaaacgcatgccatccctcctccttgaggattgtttggaacgtgcgtataacgccattgtaccgtgggcggctgggcattccatctgacgaggatatgccacccgaccggccgcggtcatgtggatgtttcaatccgccgcggaatgcgatctcttcgtgggattgcgccggaacaccccgttgctgtgtttggagtcgtgtccgcaaaacctcgtgcgggtacgtgattgtgctggcacagatcttgctgaggaaagtggcagcggatattccagcccagtgtgagctcccatcctcctggtgttcaccgataccagagcccgtgaacgtcatttttagatattcgtaaagtgggaattgaatggccacatgtgtcagtcccagcagagccggggtgaggccagaatagaaggagcgaaggccctcaatttgatacatctttcgagcagcatcccatgtgcctttgtattgccaaggggctcgcactccttcgctgttttgtttaatgctttgtgacatgagcctagttttgatgacccaaatagggttcgtcacaaccgttgaacatgcaccggccgtgaccgaagcatagccgcgggataaccaccagtttcctgtggttttgtcagtactgctgaatgaccgaatccttcattctggagtacttacctgtcttgtcatagaagtattcacgagcacggtcatagactgctagataaacagcccacgtggggagatatcccagcaacattggacctagtccctggtagagaccgcgaatgccatcttctcgccaaatcttccttccgcttccaagcaagccacgatatagcatccccgaggcaacttgctttgctccccgccgaaacccgccctgggcttgaagcttcgttttgataacatcaagagggcatgtgacaatcccagaagccatgccagcactggctccgcagagaggtgctacgtaaaagttgggtatcttggtggaaaagagctcgaggcgaattttgaaatcggagatcggcgcgggcaagttgggggcattgtcgacatgggttgaccgagcttgggattgggagctgtctggagcgcctcggccgtttgtattcatcttggcggctggcgctcacgcagcttttcgaccgtactgaatcaatgaggcttcccggacacgagcatagttatcgagtggctcaatccggaacccgagaatactatttcgaacggagctgggaaagagatgtagatttatccggaggtccaaggtccaaagtccaaagtccttcgcgggtgtaaggaaggaggtatgagtaatgacggagaattgagagagggttttggggggccgatgttgccgaacccggtgtgcttccttttgaatgcgcaatgttctattatcagcacggatgtgggcggggttctcggaatgatcaagcttcttaacgtaagcagggatcagtggattctttgctgattgacaaatcccatctctctcaaatcaaatgacaagatcgcaaaggggatatgacatagcaaaccgatctgttagatagagtgtgccgattgaacaatcccagattctcgccgcctaaggcgcatatagatcacgtgctaatagcctcaggtgtagaactgccgtttcaggactagccgcccgagctccgttttgcacaacctcgcaacatcgggtcatctcgtgttcccgatagcctttctaacctttcaccacacccacgtcaattgggatacccgggattcaaaatgtctgccccttcgctcgccagttacatcgtcaagcgcccatggctcaagagctggctcacccctctctcccactggtacaccgatgccgccggctacaggagactcggactcaagtaattcttgccctctcacatcgacaaccccccaccacgagcgattgagacagggattgggaattgtcaggtcaaattcgtcatacgtcggtggcatatcttttgaatgcaatcggagtcgtgtcgaattcgcccggagccccggtcttgcggatatcgttcgcggcagggttggaccgaaacacttgctaaccgcccaactaggttcgatgacctgatccccgaggagagcgagaacgtccagaaggccatcaagcgtcttcccgccaaggaggcctatgaccgtgtcttccgcatccgccgcgccttccaggttcgcccgatcccttctgtacccgactggcgcaaaggctaacaaatgtgtcaattgcagtgctccatctcccacactcttcttcccgccaacgagcagatcaagcccgaggaggtgagtccccgacatccaaatttcgccctccccgcattagtctccatatcggccaatcctgttgcacggatttgtcacatccaatccgactccgtttcggggtatacactctcaccacaacgaatacaatgctaacgatgcaaatcaaataggacgtcgagtaccttagccctatcatccgcgagatcgagaaggaggttaaggagcgtgctgaccttgacaaccttgttgtccgcaagtaagccgttgctacttggttcaatagaatatgaaaacaaggggttggggtagcattgttcttggcatggaataaacgcctggtgtgctttcttcgtaatggaatgggcgttgtcgtcggcggcccatggcttggttacgcagcctgagtgtactgatactgtacaaatcgattttcttcgcgcgcttatattcatggtccatcttgtatcgacaagcgggtcttgcacctcttggacatcactctgtagtaatgactggataagctatgcgggttgtggtagctggtctgtttgggttcgcccaataactatgcctacacagtaaaccatctttcaccttttcttatggctgtgaactcaaagccacaattcatttcaaatattaaatatatacactataaaaacttaaactacaacctcatctcgggtggtcgacgtctaaatcacacggtatcaagacaagccggattcacggatgtagtatctcttctacctcttttaaccgccaagaacagcaacatcaacgttctcaatccgccacatataccacatgaacagactcctagagcaactaggttagcacattgtctgctagttaacagtataaacaggatcaagcgtacctatatggtgcaaacttggcagcaagttcaagcatatccttttcagccatatatttgaacttaccaccacctttgcccttaagtttgctcacatcacgacccataaaggcagcgcagcctcgcctatcatagtgtcaataaacgcttccactaacccacagcacaaacatcacccagctataagaccaatagaatgaaatcaagaaatgaacttactgtactcccaaatccccagtagaaaacacatcaatgcgcttaagcgcaaacatagcaaacatctcaaccgaccacttccccaacccccgaacagcaataagcttttcaaaaagctcctcatcagtagcccgcgccaacatcctcgccccaagctccccactagcaaacttctccgcaagaccctggatatactccgccttgcgctgcgacagccccgccgtgcgcagggtagcgatatcacacttggcaacctgatccggagtcgggaatttggcatgtctatgcccatcaggcgcaacagtatcgggcaaatcaaacagtgacaggaacttgttccggatagactttgctgccgcgccagagacttgctggccgatgatgctgctggtcaggctgttaaaggggtcgatttcctctgccaggccggccggcgagaagagcggacatggatgctgctcgatcactactgcgatgcgcgggtctgttgctatgaggtgcgcggtggctttctcgagcagtgtccctgttgtggctgttggccgtggaagtccggtttttgagggggaggcatcttccgcgtgcgctgggtaggcgtttactgttgagccgtggggggttatgaggattgcgtttgttcggtgcgggtcgacgggacggtcgaggggagggggggtctggggtctgaatatcgtggggttagtgggtgagagttggttgtctgtttcttgtttctctgcgactgcaggctccggggaccaataggaggtccctgtttttggttttggttttgtatttgtaggtttcttgtctgatttgttggtctttgtgggtgccttgcgaggctttgtcactgcgctgtgttggactcttgcttcgctcggagctgagctttggagtagcggtgacttgatggttgggacggaagcaagtcgggctgagcgtctgagtgacattcttgaataatatcagatattcaatgacctatatatggggtactggacctgaggaggtctgaggagtcgtcgtagcggaagctggggtttgctgacgtgcggagttggagatccgccgcgctaccccacgaatgtcaaccacactgacactcttcaatgggagctggacagacagacatcgaagcttaataatattcatcattgaccgttgattttcgatatggtaatcgctcttattttcgtgcatgcttaccacttctcatgtatgacgtatttccaacatatgcaagctatagtcatctatatatctgagacctttagacaccgttatgggatcccatttgactgaaagcctacgtgcaggagtcgtggatatttctagtagtttcaacaagcacctgtggagctcaggaatttgtttcttacgccaaatctatgaagaggagtagggttgcctgccaagagttatatccatgggttatattgaaacttacacgagtaactaactaggatcttatgaatcgcacattactcctcttgtcatctctctctaatcaatatcatcgtcatggattatctgcaacatacatcaactcccttcgttgtatagatgtggtatgcgatccactgatggttctatgggttgttttattgcaaacagtgctatgattccaatgttacatcgacgaaagttcgataaaagcctcaatgcacatagatgtagcatccaaggctatttgccccaatgatatctatggtatgtgccgatgatgaaagatgtacggaatagacagttgctataaatatccctataatcttgggagacgtatacggccagtgattgtaccttggatttatactgagaactcacgcgattggatgcgatatactccgctacagcattgtcccaaggaactatccgcaagaacaccccgtggcccgaaattgaagaaccatggtagcttggtaatatattacgagatttacatgaaatttgaaagacttaaagatcgaggatgggtataattcgtgatatattagcgagattttggattgaactattgttcaaaagatcggggctcgcgtcggtggcttgcgattatatattaacccaatcgccgacgaattttatcggaggggttaaaatagaaaaataaatgaaagaacagaaatagtccaaacgaaccgaccgttcatctattgcaattaatagatatcgaccaataaaaaccgagattatcatttaggccgaagcgttgagccgagtcaactccaagacgttggtgcattagttcgaaatcagaaacaagaatgaatccctgctcgtgcgactaccactagaagccatcagactatgataactagaaggtctcgccttacagccccagccttcaccaggataatgcacataacccagagtggtcgggcgagtacattgtgcgtgtactccgtacttttggatcattgtccgtgttctagggaatgtggccattcgcaacccctagataggtcattgctgagcgttccacgcattcccatgcgtggccctctcaaccttttagggcagacgggaatgtgtgttgaatgctaggcagaaatcaccatacacttgtttctttgtctttcgtactccgtacctactgtgacaagtgccaagtttagggccagtacagctggactcagctttggggtatccatatttgtggcgtaacgagcacgggcaagtattgaagtcagtatgtgtcgaatttttccgaatcaatagacttgggtttcgcgacaaggccacgcggccattcttcatagtcgaagacgtacggaggaggatatagcaaatcattgaagtctttcgataggattggacgcgatagaaaaaaacatatcacgtagtggagcagtacaagagtggggtgcgacgtatcgagtgagttggcttcttctgaaacatttcccgactttacatcgccaataaccactttgccacccgaaaggggaacgacatttaagtcagttgtatccggagtacgaagtaaatattccattgtcaatactgtcaattccattgggtcttctagaacgaggtgcgatggattcgctatcgaagatgtaccgggccgatgaagctctagacaatgcttgacaggagctccatcgccggggccaaagttatagccggttctgcattgttaccgaaaacgcacagatgttgaaattttcaatgtacaacgtacgaaaatttccaaatgagtccttgagatcgtctggaggtgcgtccttgtgatttaaagctgtacatgtacatgtacaccgtacaccgtacaacaaggcaaggcaggtacctatactccgtacttggcgaggttatgtacctaattgggtacgaatggaaagtgtggcgaagcttcaaatcagtcgtgatcgactaccgatctccgagaattagattacctcttataccaactgatgtgcgcatggcgcataaattaggggtctgagagggactgcatggcttgatgcttggcataggcttttccgagcaccatttgcatatcacattcacgaggggggcgatgtttcgcctcaggtagagttggattttcggaaaacagccaggattgacagtaatccagggcgagtcattccaacgtgccaatcaaaagtcgcgcatgccgcaatcgacgatagcggcagggggcgggtccatagaaggcccgcaaatttagatcggccactatcaaagtgagaagcttcgaaaccagtttgaagattgcgtggctagtgtttcggggagaatcggtgtgtgtgtgcactgtgcagtggtggaggggttggcagttggtatgttgtaggtacggagagtctatagacctatgcattgtataagaatagttataggggctgagattgtctcatatagatgcaataagattgaacgagaaatgaagttacagtctaagacaatttaagatcaacaggggagtgagctgtgtcggattactagatgacgacaggttgataaattggctagttaacttcttggtcaagttcgttaagacgttcgtcacgagctagtatcatgcattattattagatccttctagtattaaggacgccggggcgacggtataaatttacatggtccatgtccaagataccgaggatatgacaacgtacttttgatatccgcaaacaaagctacaagacaccaaattctacggtagtacggagtatggagtacagagtacagaatcgccagtggcaactatcagatcacccaagttataggctaccttgccgagtgcatagcccgaattgaaagtgacgaaaacatctccaatatcatgcaaacatgaatatctacatgtgaactccaatattccccagtctatgaatcatcatgtaaacaaaatactcttccaaaggtttaccaaaatggagaaaggggggcgacttagcgttgaaaagcagggaattggtctggagttatttaagaattgagtttttgatttgattggtaatttgcagtcctgggtaattttcagctctggtaatttgtggtaatcctggtaatttgcgtaaccgtccaccactcaagtcacgagaaacccgataaattacctggcactgccctgacatgccggatgcggtactgtgtgtgtttcttcccccttggtatagtggcacctggtaagattagaatacaaacaatctccaccctcccctttcctctcgccccaaggctccttcttcttcctcattttactctcctccaaccttcgtccattcgttcttaccattatttgaagttcctgcctcgtaccactcggcagtatatctccgcttccctctcgtttgaagcgcttcttctctaatcactcattgcgaattttcctgctcaacccattcccatatctctaatcggtaccgacaccaataaccccctgatcgaaaaaatcacactgacacctcctttagaatcttgtgatgtctctcaagtacatcctccccgcgctggccgccagtcgggcagttttcgctgccagtgagtattctgttcccggcataatgatacacccactaatcatgtcctcttacagcttcctgcggtgataccaaggtcagcacccagagcgacgctgatgcggtcaacacttgcaccaccatcaagggtgatatcaccatcgacaagtcctacagcggcgaccttacgctcagcggtatcgagaagattactggtggtctgatctgctccggtggccagaacgtcagctctatcagcgccagctctctcacatcgatcggcaaagccttcgacttggagggactcaccaccctgaccctgcttgacttcgctgagctcgactctgttggctccatcaactgggaggctctccctaagctccagtccctgtctttcgccaagggtgtcacccaggccggcgatgtcagcatcgccaacactggtctcactgatctgaccggtattaccctcaagactgtcggtaccttcagcatccagaacaaccgtgatctgaagaccatcaacatcaacaacctcatgaacgccaccgacttgatcagcttctcgggtaactacgataccctcgaggtcgatcttcccaacctcggcaccggtaccaacatgaccttccagaacatctcctcggtctccctgccttcccttgagaagcttaccggtcagctcggcttctggggtaccaagttcgagactttctccgctcccaaccttacccagaccggtgacttgatcttcaaggacaacaccaagctgtccaacatcagcatgcccgttctgaagactgttgacggtggattcaccattgcccgtgatgacaagctctccaccatcagcctgcccatgctccagcgtgttaacggtgccattgacttcagcggtacattcaacaagtgagtatccttcccatagctctatctgtgcacatactaacaaccaataggctttctcttggtgctctcaaggacgtcgagggtagcttcaacatgcagagcacccgcggtaacttcagctgcgacgatctccgcaagctgaagagcgacgatgtcatcaagggtaccttcaagtgtgatgccaccaacgccaacgccaccacttccaccggcacttctggctcctctacctcttccagctccaccacctctgctgctaccagctccggtgctgccttcatgaccggcgccaacgttcccgttgttggtattgctgccgtcttcggtgctcttgcccagcttctgtaaggtgttgattagtggaggattcaaatgaccttggggatttttgtacaaaagtctaccaagcagcgagctcaatattcgttccacattgcagttgttacgataataattcggtctttcgtgcagaaaattcgcaatatggattctgacctcgggagacgcctctctggaaggagttcttttcttatccttgtgtttattgctttgctatgttccaatgttcgctcatcgcgtcctaatgcattcggttgcaatttgtaacctgctcgttccctgttgatataccgaaaggggaagctgctgcgggcctgttggtggcatctcggttcttgttgtacttcttgtgtaaacattccttgagtttttttaatgccgtaaccttgccttttattctagttgcgtgcgagataatgattgtgtacctttttccccggacctttattctcatgaaagcagccatcgtacatatgtatcatgctagttctgagtagccatgtctccttggtccattcggcctcggtataccccttagacattgtgtctttgcagtgcctgccgcccgtccaaatagtgtacacacacgaggaatctgtcatccgttttctatatccatcaaagcctgcggctttctcaacaagatatatatccaccatgaatcccattccataaccacgccatgtccaaccaatcgaccactctagttccaactacctcgctacagaccaacttcactagatcccaaagtcaaatctccaaagacctatgaaacatgaaactagtctccccaattccaaatcgcaccgacaagttgaacacagccagcatccacatccatccacatccacacaacaaaacccccggtgaatcaattccaacacaacctagcatgtgtctacctaactagttacatacccaatactactctatcgcacctactccaacaaccccatcctaatctgaggtcataaccgaccagcatcacaaagccagtggatcccggtgggtacgcactaagcgttggacgctagtcactcactgaatatcggtagaacacatccatgtgtgcgttgttcttttttttctttcttggctcgggctagttactaggtaccttagtagttgtgggataggtcaaaggccatggattatgggaaaaggaaagaaaagatgaaacttggttcggcgattcgggctacataggagtcgtccccggggctctctgctcctatgcaccatagtggctgttggggtgcgctttttttcgttggaaggtggaatctgtgggagattggttcggagaattagacaatagtatattatagttacagcgtggaaattggaataaaggaaagtatgagattctattctgttctatttgagctagtaaatatctactcccaagtacataggtaggcccatatggtatgattgtcagtagacattgtatgttgtatgccagggatataatgatagtacaacatagaagtaccttcacactcgttcctaaagctaccatgtgcgtctcagaatcatcctatggccggcatcaagttccgaagcagtcagaaatcgataagtcgaatccacagcgccgggccgcatccctcgatccgattcgaaggctatgtgcgggctcttcactggcgagttacatatgtaccaacgatcgggatcgcagctagcttgaaacggacaacaactttcatcgaatcggaggatgattggtggttggtgtggttggttctcttatccggagaggaatatagggttgaaggaaggctgggacgtttggcgtttcgatagacttggccaatcatgggaggattattttggatattgttatgtattctattagtccgtatatattgcattatgatgaggtacaagtacatattttgagatattactttacaatcgttacttcgcagtcaaggtaattgtgcagtgatagctcgacgcaggtggctgggagaggggaatcggcgatcgttacgctctgaagactattatgcattagccttgcggtcgccggaatcttattttgagagacgaactcccaatcgtgaaaatcaaggaacaggcaatctcaccatttagacttatacaaagtactggtataccgtatagagcagtggatgacgcagggaggggtgttggatgtgtgcatctcatgattgccgcatgtgtcgacttacatgctccagactgtgcctgaacggctaaaatccatatagagaggtgttattttatagaaattggaggaagacagatggaggctgggacaggtacggtgattgacccgtctatagttttttttagaaaatctttcttttctttttgttcctctgcgtttcggggtcacccacttgaaacatttagatgtattcagaggcattctgatctctcggtgtcaagatattcgatctacgaaggcaaaatatcctttgatggagagccgaacagcaccgaacaacggcctgattggccctctctacctctacaacgttgtatctacctctacaacgttgtatattgtaaatttcacgtacttcgtactttgagtggcttttttagtgccctcgatctacatcggcattaaagtgaatatggaactgccaagacaatctcttcatggggtctggcggcgctgagagtggatattgaccctctttttttcttcagaagacgaaactggatcgaacacgggtacacgcaatcagaatatgtaggtaatgttgtcttcttgcctacagaccagcccgggctcagcagctccgcacataaaaagtggagagaagtgcaaggcatggctggcataagaaattacggagcactcggtagttaagaggccatgacagcatacaacataatattaaggtggcaaggagttatcccacaacggaactccgcttctgtatccttgtcagtccaaactgaaatcccccaggaatatgatgcatgcaggccgaaacgagaaaataaaaaataaaaaacaagggtacctgaataaagatgcacatcttcaggtctagccgaccagcagcgtacatccgccttgcattggaggcaaccagcgatccaggtaatgggaaattgtggaggccctgagcgcaccatagtgcgaatcggagcggcaatgcatcatgtaggaaccagatccggacgatcgctcactagaacgagagggaaagcggacggtgtacagagctcctaaagagctccacttcgtatctgtgttgcctcgatcgcgaactccacggggggaggatgtgtgcctgctgtatgtgtatgcatgcacctcgggggcgtccctcgagtgtgatctctcagatgcggcgaatttgagttccagaaatagtccatacaacgtacgtatgtactatgtaccgcgggcgtctgctagatctgtatattaggaagttgtccttgcaggagccggtggcgactgcgccagtcggggaatagattccctacggggattagagagtttctgtatcctcgttcgtggggttggggaattgaaggactttgggctgttggtgttgttttaggattttttcgtacttctgaatggtagatgtctgttgcctattcgagtaatcggtagtgaaccttacattcaagattatcttgtacttcatacggagcatagagtgggcagttaggtcttgatatggccttttctactccgtactgacaattatgatcgtctgcccttgctgctcatgccgttttcaatattggatagcatcatgtacgaggataacaattattgtctgtcaatgctctaaggcggggagagtactctgtacagaggatagtgcccggcgattcatgcaaataacttcctctattgaattgcctaacaggacacagccccttccgtgggatgagtctaacacgagcctaaatcttcatgtttgccactaacaagaacgagtgggaaattctaggcgctccagtagggagacaacacgcatagtatgtagtgcattgtatgtacgaaatttgagaaggcgattctggaaacagggaatagcaatcataatcgaagatctcaaaaaagcctcccccggaaaacgagaggtcgatattgcactcagaaaccacgaatcacattccatggactaagaacccgtccgggtataatatcctacacttcctgattcatgctacaaatataataagtgcaaacagggaagaggatctgacatcgtgcatgaggcgcttttaagcgcttggcgaggtttagcccgatagtattggagcatcccaaatcatcggataatcaagtgactcaaattactccatacattaatctatagtgttcgaataagatttttctaattataccgtccccgcttcgtcaatgacagttgaaacttgacaggtcagaggcggcacgggaaggcgactattggtaatgatttggggagaacaggggagcagagatgctcattggcgatgcgagtaagctttgcgatgacagcgtggaggcgaagggacctgagaagatatgtacttacaaatttgtatatggtggcttgttccttacacatgagagccgcacgggacgcggatcctgtccgagcttggaccgaatgctgtgtaatatagaaacaatatagaagaggggctatgaaagtataatcatcgcatcatttacagccaccgtaagaccacggtagagatgttcatactagaaatgcacagggtagatgtctatgtcctcgatgacacgcacattcacgcagaaacggcccatgatgaaacaaaacccctcagaatcgaacccaagggccaggttcagagtctattcaatgatccgtgaaactcaaaattttcgatttcctagtattaagaagatccggaggggagcccctatatgcacgtcacttaaaatggtaagcagggagggaacaaaaaggacaagcgtgaagatctatggggcccagattgttcggactttccgagcaatcatgtccagagctcgatcgaactcgggttcgtgtgaggttgccctcgagttgctactgttcgtgcggtctgcatatggcgcagagacgtgcgaaagtcagtatgagccaccgatcgggtgcatatgctatacgatgggaacagggaacagggaagagggaactacaactgagtttcagtgaggtttacaaagtacgaaagaggggggcatttaggtgaggttggttatctcttccgggtagaatgcatatacataacagcctgtccttaatttgcatgggctttttgtcacggcaataaataaaaagaataatataataggattgtgaacacgaacggctagaacgtggggactagtgtcctcgatggagtcgccatgcagccagctgattgaaagacgggaagggagaatatgacagctctattccccaacccaccagcggtgttctagtgacaatcgggcaagagagatgagtgatagattaattgtatggagtatattatttgagattatcgagattaaggagatgcaaagagaaatagagaaataaatcgatatgaggactgaacatagggctatccctctccactcagggaacgtgtccatttttaaggtttttagggcttcgctaggaataaaaaccaataaagttaacattctagatattattcccatctgactcgtcaattctctaacgtctgtgtctcacccaattccaaatcatctcgatcgtcatgattcgctgtctgacaggagacgtaccctggtctttgggtctcgtcccaactcgctggtttccccgtcgtttcgggtgacctattctgttgacctgcttctatgactataccgagttaatgatatttggcgtcaatcataacgtcgaaactgtcaatgtgcttatagctacctaggtcgattattcccgatttcattgtatagaactagatccttattcttattgatgtttactttacctcctcgcatgtatcaagatgacactcccgcggtccttgcttgatcctattactgaggggccatttacatttactagaagcgcctcgaggggtattagctcgttgataatagccaaccccttgatactatagcacgatcatagaagtttctcctgactatcgatgcaggagaccggtgtgcattcgttacagcaagcgtttcaccatctacggagatcgcagcgaggatttgatgatgagtacgggcatgaccgcgcatgtagatactgtggagtatgcaggtaaaccttagttcgattcggcgtttttgctttttttgttcttttcggcttcgttctcaccaacaattcccatgtgaattctctggacgttttgatagagactccaacgtcagctattggcatagctattgatgcaagggccataatgcctctaaaaactaaaatattccccgtgtcgatcgcgacaccaacagtccggtgacaaattaggggtcctggatcatcatgaaccttcctctcgggcttgatcgcattcccctcattcgtcgatctgatagattactatgtgaggttcggtctgtgcatgatgtgacagatacgtctgtgataccgaatataattattttcttcgatggcgcttcttcccggcccaagcggacactagcagatggtccagagcacccacccgggatgcccttcgtgcttccccgtcgtcatgaagctgtggggcaaagaagtccatcctctgtctgtatgacatccgaaattccgcgcttcatgtctgtcgaggatcggctggttcatcgatcccctagcctggatctgggaataaggaacaaagtactctcccaatctacatataaacatgcaccccagcccgcatggtatccctttttatgaatatcctcattgtatacactcgcctcgtgtagattccgatttgcttcttcctctattctgtctatagcctgccccctttgtccattactgtgcatatacaaccttgattcatctgcactgtcgccattcaatctacgactcatcgaccctttctacacgaaccacccgtgatctctcagtatatatcctctcggcatagtttgaccacttcgacacactcgccactgcacatatcacgcatttttcgacgaccaactacgatgtacgaagagatgggttctactactgacgatatcacccgccgctgctctttgccgtgagttgcctcactatcctgatatcaatctacatctcctaacatccatccaagttctttccactctagcaccagtatggctgcctcggacgtgggtgagaagcgccgactgcctcctcttcctcagatcttgcctctgccaccccgcggccctttcagcccattcaacgtgaaggacgcccttatccccactaccccgggggtccaggacactttccaattcaagtcaccttgggcagctgccgagcacatcgttactcctccctcgccggccaactctgccgaaggctcctggcaggagtcatttgccactcaaaagtccaactccatcgattggcccactgatctgacgcagagcgagatcatggctctggtggccccacagaatctcaaccgcaaggcacctctccagcagctctgcggccgcaagcgcaagggcagtgcccaatccactgaagatgaccagcgcgagaagcaccgcattgccgagggcaaccgccgcagcaacctcagcgagctgcaccgccagttagacagccgcatccacgatttcttcctcgagcgtgcaggctggaatccttccaagagccttactcaatccaaggagcacatcgtgcaaggagcgatctacctagtcgacttcatgcttgccattattgtccaccttatccggcaggaacaggtcacaccgcagctctcagagaagctgcagccccaggttcgctgcatgcagctgcagcagctagtcagctccctacagcaacaaaaccagactgcccagcagcagctcaaggccaccaaggccgagaacgaggccctcgctgaccgcaaccgcgcccttgagttccagctcaagtcgtacgagcagatgttccgctcccccaagtccgagagcaccagccccggccccgttcttgacttccccgagcacaaacgccagaagaagaatggcctacccggcatgcgggtgctctgcgatgagatcgctgccggcatgccttccgagccttcctatgctgctccctactatgactccatgcctagctcgacctcgcagtcctttggcagttcctatctctctgccacgccgcctatgaccggtccttcttctcctgcctttcccccttcccagtcttcctctttctcatacccagtgccgtcccgtcgccactctctcattacctctccatgaagccgtggagattgatgatgcacgcccgatattgaacactgttcactgatgatatcatgactcttctacctttctgcctgtgccccgtcctccttctcatcagaggcccttgcagcagtgcttgttctccctactatcgggtccgtttggcttcctccttccgtcgtcttcccgcttcatgtgcatttagcgactgcattgtgtaacaatattttgatctcggggatgcaccataggttcccaatttgctttatttcttttcctttgttgattgatttcgttgcgggtttccttttctttttttgcacaaatgcggtggtctttcttctttctttttgtctcttgtcttttggcgttgtttatgatatggatatatgttcaggtggatatattttgccttttgtttatttctttgtttcctttgtcactttctttttttatgtctatagctatgactcaatcgatcatcttggatgaaaatatgctcttgtagaacgatgatagtcctggtagtaaattgtatcatctcccttatcaccatgatttgtgatgatgcatatgccaattctctctcttgtactagtagctatattgatatgcttcccgagctagcacaaccttactctgagaaggaatcagaatacagtaatgcagcaagtgatagatttaggtttatatgtagatatagtacaacccctcgcttgatctcggaccgctgtgcagattgttgtttaggtgaatattaggagcgatatattctcctttcagtggatagtataacatatagatatctactaaagatttcatgaatactgggcctagacatgagaatgcaaagaatattccaatcggtaccatataggatctattccaacgaatcagccgtctctcaggtgtcagccggtggagaccagtccagactgagaaacggacgagttttctccgagtgttttggattgtgactgaattgtattctttctcatgagaatagtagaatagtagttcagatttatacatactagcgtaggaatggtataaaatatagtcgggtccaggccatgtctcactttagcctcgtgttgaagatcccacttgtcatttccaatgcttttattttgtaatctctgtaatcaattaaaatgaatggaattttagggggaaaagagaaatagaagaagaactacaacctcatgttagaatcgacagagatggacaaattaagagtggaaaagtactgtgtcagtgtccacgcaatccatgcagcaaagtggctacatatctaaataggggcacagaatatggagtagatggacagctcatttaattgcacccgtacctgcgtggcaacataataagaagaaacggtgatataatagcccctaaagtgcacgaggttctagatgatccaggctaaataaagggttctcagccgtcacactggttaaggggacaaagtgaataatttgagatgcttagtcgattgtatacgacagtaaaatagccaaagatccctcataactgctcacaatcccatcaacattgcagaataacacgtagaaaaagaaatgtagttgttttactgatctccccccgttcttggcagacaatcgcatttcccccgattcccgattctgttttctccctacccattcgcctcaccattcctctcgacccttttcttttctccacattcgttcggggggttttacaacgagtgttcgagacgggatagcccctggaattctacacaacctcatatcatctctcatcatgttgttgccaaagggtggtgttaattggaaatcggccaaggccagattgcctccatggagggccatcctcgttctattaacacggactcgcttcttggtctccatagccttgaccggtctggtcatcctcatgtggcgcggtgtcagcaggtctgcatcagagatgcaaaggtgagagaaacacgcgatcaaccgagacacccatactgactcgtctggtgccaacagcttctactgctatggctcgagcaagtcacccatggaaatgtccatcaacgagatggtcgaatggagtgcgcacgcccaaacccctgtcctcttcaaccgccacgaaccctacgaagtcaactccaccactatcaccgatctcgacctgaaccccatcaagtctacttccaaggccgctctcaaccgcgaacgtgtactcatcctgactccccttcgtgacgccgctccttacctggccaaatatttcgacctcctttacaaactgtcctacccacacgatttgatcgatctggccttcctcgttggtgactgcaaagatgacaccctcgcaaacctcgcctctgaactcgatcgcatccaaaaccacgccgaggagaaagttcgcttccgtagtgcaactgttattcagaaggatttcggtgccgacgttgagatgaccgtggcagagcgacattcgttcgccgcacagggtccacgacgcaaggctatcgcccgcgcccggaattacctgctctattcggctctgaaggccgatcactcctgggtgtactggcgcgacgtggacattaccgattgccccgagcgtatcctggaggatttcatggcccacgacaaggatatcctcgtgccaagtacgtgcttcttagaatttagatccgacgttggacagctggctgacagtgacattttttttttagatatttggttccaccgttacaaccaggatggccatgatatcgagggtcgctgtatgtatacccacgacaccctgtgtgatgcagattgctgacatctccactcttagttgactacaactcatggatcgaatccgacaagggccgccgcctgcgcgcgtctctgcctaccgataccgttctggccgaaggctacaaagagtacgacactggccgcacctacctggtcggcatgggcgactggcgaaacaacaaggatgaggaggtggagcttgacggaattggtggcgtcaacatcctagtcaaggccgatgtgcaccgctccggcatcaacttccccccctacgccttcgagaaccaagccgagaccgaaggtttcgcccgcatggccaagcgcgctggctaccaggtggttggactgcccaactacgtggtctggcacatcgataccgacgagaagcccggcaaccttggagaccgtaaagcgttctagtttttgcattccgtccgccggaaatctcgattgggatcaagttgatctttgatcccaccccgtccccgaacatccaccagtctccatcgccgcccgtgtgttgtcctcccgatggttaccattaggggctttgaaccgcggcggcttcacttctttcccttctgacccttttcttttccttttttcctctttttgggtggatgtttcgcgacggaaagcctaatgacttccctaatacagagtcttcgtgtcgcgttttagggagtgtgtgtatttgttaccttggcgctagggggaaaatgttgtttggcgggttcgcaggtctataaagttcgccggttctccaggcctctttcctcgatataccgaatctgtgtctgggacacacatcccgagttatgggggtgtgtgtatatccattacactcgagtgattcaatctcgatcatctgttcttcaaacctacattagggacggagaatcggaccgtttattgtcatgtgtcgttttcttgtttcccagtctatttgattctgattctgctacgcaggtcacctccaaattgtcctttcgatttcatcctttttttccgttctgtcatatgctgagctggcgtccttaacattttttttgagatgagagcaggatatcagaccaactcagttgcaatcagatgctgtgtgatgagtctagattcttgcagatgaagcaaggcagatattcgcctgtctgtcgagtttcatgtatataatcaaatgcacgaattcattccctgcaaagatacaagccacatcttacgcatcacgccaagtacgtagttcgctagatctcactcgacggcaatatcatatgggcaaacaataagccaccgctgactaggtttgaatagtatgctctaatttagtaaatacagagttaactagtgaactaactagtcctaaaatgataacttgatacaatcttactcaaacaggttcctatctgcatacccctgcaagaaattgggctaacaacataacgagttaaggctaacaggtaacgtaatcatctctaagccccccgaaagctgtctaagttgcctaactctgacaagatcgagccaatctccaaagatgaaatgatataatcccgactaaaccactttgtttgaaggcgcttgcgatctgcctaatactgcctttgttactccagagggcatgggatctacaggatcgccactataatcaactccagtttcgcttcatcagacaacacgatgacccccgtatctaaaacgtgtcaacgttgcgcagactctaaggtgcgatgtgtccgggataccaatatcgccgcatgtattcggtaggaatccggataacctctccgtggaagaaaactggagctcatctaaagccaggtgccgccgtttggaaaaagaaggtgtacatcgccggactggccgtcgatttaacggctttcataaggaccggtgagctggctttccgtgataaacatggtttaatcgcatctaacccatcacccagtaagatcgccgctctcgagtccaagatcaatgaactcaaggccgaccgtgctggcccaaaaaacaacaacagcacgagcacacgcaatacatcattagctgacggcgatgctcctgaagagatcatcaacagacacttccttgacgtggataccgccgaaaggtacctaagcacgttcaagaccaaactgaccccacacttcccatttgtggttgtaccccctgatgtatctttcaagcagctccgccaggagaaaccgttcctatgcctagcgattcttgcatcggcttcgtacgagaacatgccgctgcagcgggcgctcggcgacgaagtcaagaaagtcgtcgcatctcgcatggtcatcggtggggagatttccttcgagttgcttcaagggctgctcgtgtttctcgcatggtaaccccgattcttatcaatactttgatatttgtgagtgcgtctgacagaatatggcaggttgcattattactcacggccacatcggtatactcaattcctccaactggctataagcatcatgatagatctgcggttggaccgtccgccgcagacacggacgtggaagacagagttgcgcttcgggcttcaatataatctgcaggatcggacgtttaatcggccttcttgggggagcaacgagcagagggctgttttgggctgctactatttgtcgtcatcgtgagttttctttctgtcggggcttattgggtattggctgatagttgtttcgcttaggattgcgatgcttgtgcagaagaaatctactattctacgtctcccgtaccaggaagagtgttgcaagactctccgcgaagccaacgaatatccccacgacaagtacgtcagctatgtgatacagctacagttcattgcggaaaaggtcgacaatttatctgcaaagcatggatttgacttggaaacgcctgggtcggggtcggagctgtatatctcgaatcttaagtcggacctggatgcattctaccgtcatctacccttcgatatcaacgacagctgtaagtcccagcaggacaccaaattcactttcaagatacttgagactaacttatacctgtaaatgaagttcttcttgccatacaataccacgcgacagggcttggcctataccaactagctctcaacatcaccaaccgagatccccaaccccagttcgactccgactcctggaaagatgacatgtcgttctcggcacttatctcagccagttcgattctcaatctctacattgaactcccatcgaacgaggaagtcggattcaacaatacacaatgggtacagatagcatttgccttgctagttacctatcgacataccgtggcagcctcgaagccagatcaaactgctgccttcctacagactctgtcaaaattgaaatcgagggttggggcgttgtctacctctgatgtagatatgaaaggcgctcgagatgctttcttcgactttaagaaccgtatagttcaaatcgagaactggcttcaggggcatgatagacaggaggataactcccccagcgaggagaactttgaagagtttcaacatacgttatgcgtggaatccgagccgacgcactttgacgggtttacggaggctgtcgagacggaggatcttgatgtcactctgtggaatttattttcatcttcggcatcgggcttgcaaatgccccatgattttctatttgcatcttcttctgagcagattgtgggtgattgggtatgattatgatttcatttacggagctaccgaataaatctcaatattgtcttacctcttcgtatccatttcctccagttagtagtcaaaggaattgccaacatggaagatatcaaacaaatactgagaaatacgtgaaagcagaactgaataaggggcagtgctgtgactcagagtttctaagttgcgctgatcgaatccttcttgtatcgccgagccgatctatacaacgcgccaagaccttcagcatcaccgacccgattctgaaatataaaaaataaatatagatggaagacggatttgaatccaaatcaattgctattcagtcaaaatgccttcaatctcttacgctccattcttcttgctcttctcttcggccctctctttcaccccatgtccactcctcggccctgcattccctccgttttccctcgacacaaacgacaaaactgttgcaggggccctgcaaaagcttacacagaagtttgacaccctagtcgcaactaataatggcactcatggggatacctcgccaaacaccacctttagcatcgccttgttctcgtctgacgccgggaatgccgaagacgagcccttcttctggcaatatcatcacacagctcctatattgaaccagtctttggtaggatctcacactgcggacaaagacagcatttaccgcattggtggtctcactgaagtcttcactgtgtggagtcttcttcttgccggagacggagaccagatatttgatgatcctgttaccaagcacctccctgagctgattgataatactacaagggaacaagatatgaatggacgtgtaagatgggaggatgttactgttggtcagcccgcgagtcatatgtctggaattgtgagggactgtgagtaggacaccgaacagggcaaggttgttggttatcagagctaattcatgaatagattgctcgacggatgtgactttgcaaacaagttctgctgaggctggactacctccactccaggctatcagcataccttgctgtggtggtgattccaagtgtgatagcagtggtatgagattcaagtccgtgcctgctctctgtatactaatctctttatagatttcattcgacacctggccaaccaaactcgcgtggctccggctggggaaactccaatctattccaacatggcattccagcttctaggctacatagtagaaaagcgcacaggaaagcccttcagcaaagtcctacatcacatatttgacgtcctaggcatggccgaaacctcgatctttgcgccaaacagcaccactgcaggcatcattcccgtgagcaaagaagccagtggttggtcagcacacctcgaagcagacatagcgcaagttcatactctccccaccacatcccagtcaccaatctaacagtgcacccactgcagatcaaaatccattttctccagtgtcaaagatctcgcaacagccggccaagcaatcctaaactcaaccctactcagcaaaccccaaacaaatcgctggttcaagccagtctcccacacctctaacccggccaactccatcggatccccatgggtcatatacagtgccggctcataccccaacacatccatggtggacatctacacagttctcagcaacgaaggcaacgacaagagtctttacagctcatatctcggcctggtccctgatttcggcgtcggctttgccattctctcggccgatagcgacaccccagcagatctcaacgcgcacgcagatgatatcggtgatgtcgtgctaacagcgttgatggaaacggctaccgagcaggcagcccgcaatttcggtggcgaatacaaggtatccaatatcaattcgtctattgttgttgagtacgatagcttgcctggtttatatatccaggagtttgtcagtaatggtaccgactttcgtgcaacgctggctgggctcgtgggtgtcgcgaagccggcggatctgagtattcgattgtatcctacacagctggttgaggattctggatctggctccaagcaggggtttagagctgtctttcaggatgtgactgagttggcggatgctggaactgcgacttgtgtgtcgtggctagatattggaaggctccggtatggaggccatggcttggatgagttcatcttttctctggatcagagtggtcaggctgtcagtgttgagattccagctttgcgaatctcgttgcaaaagagctagctaagggctgatcttcttgcttgaagtctctttttttatgtgacatcacttttggagagccgtgccaccagacatcgaatatataaacgaagctattcggtttgctgaacctcaacttcctctgacttccttcgactagtaaagttcaagacatcatccaagcaagatatcatcatgcacgtgacccacgataaccttgctgacatacgcattgatggcccggggcctgagctcataaagcggctcaaataggaaagcccccctagggaaaaatccgtatacatcgaggtactttgtaggcgcgtactttgtacagaaacccccgtccacaatccaacatttcactcccttcaccatgccactgcgtctcacccgcgtcattcaaagcaaagtccccgctttcccccacgcgcggcaaccattcctccgcgtcccgccatcacacttcttctcctcctgcccctcagcgtcgatcaaaccttcccttgtacctagaaaatcaattctagccttccaagcccgcaatatgtcttccgcccctgctaagcgagagttcctctgcatcctgcccgataagcccggtgcgcaggcgaagcgtcttgaggttcgcccgtgagtcctctctagcatctagcttccagcgtgcgacgtactccgggatgatgagtctggctaatgcggtctttagtaaccacctcgagggcgttaagccacacgttgcgtccggcacaattgttgccgctggtatgtgacccatttcttcccttatgtagttagattgtggtatgggagcttctcaagcatttgtactgatatggattgtctcttgttcaggcgcaatgctcaatgctcaccccgccgatggcgagacaccctccttcaagggaagcatggtgatggctgttgcggagaatgaggcccaggtccttgagctgcttaacaatgatatctataccactactggtgtgtgggatatggagaaggcgcagattattccggtatgttaggcaggaagagtagaggattgtctggtttttttacctgctcattgctaacttgttttctggtttagttcaagtctgctgttcgtcaggctttgtaagttgcatgtctagtttagctttgcattggatctgggacttgacatttgtcgtttatattgaataaaaacaactggtcattgagcttgtgttgtgtctagatgcctttgggctatgtggggtggtctgttatacttttaagagcgcatagcttgatagatatagttggcttaatcagtgagaaagccgaggatagacacggttagcccggtacttttctatctgggcacggagtctccgtatggagtatggatatcccgattggaataagccgagcacaggaactatactccgattttatctccgaatgccagcgtgtatcatttcgatggaaccctggaatgtacggaatagtaatagcccgataaacgtagattgtattcgaatggtcgaagaatctaagaacaccaaaatgatgattgatcgcccagcgttgactttacgcctatcactcctatccactatttgatatcatcgcccaacaattggcccaaggcgaggcggaaaacaagacgttgaccgggcgagtccaccgcggagaacttcagtggtgcacaaaggtcgccaccccttggaactgatatcaccagcacgtactctcactggcacagagaaagaataccccaacttttctcatcccgcacatcattttaaatccagcgaagactgaggaagggaggaacggacgtcatctttgtcatctccgacgaccggcggatccggccaaaggaactaccccattaggcctagcgtgcttatctaagagccgatcagattatttatgaattcatcacttcctccctatcagatccatcttttttttgcctcccaacacatatcaccggtgcaaatcaatacccatattccatcaaatatacccatcataattcaattcaaaatgttcaagcgtttagtcactgttgctcctcgcgtcggctccgtcgcgacacgcagctctctttctcccctcactggcttgcagtccgctcaacccgccatccgccgtgctgctcctgccccagcccaacagcgcagaggatatcacgagaaggttctcgaccactacaacaacccccgcaatgttggctccatgcagaagggcgaccaggacgtgggtactggcctcgtcggtgcacccgcctgtggcgatgtcatgaagctgcagatccgcgtcaataaggactctggccgtatcgatgatgtcgtcttcaagacattcggttgtggtagtgctatcgcttcatccagttatctgacagagctcgttcgcggtatgaccctcgacgaggctggcaaggtcaagaataccgatgtggcgaaggagttgtgcctgcctcctgtcaagcgtatgtctctctttgatgcatttggttgattcacatgctaacttctctatcttagtgcactgctccatgctcgcagaggacgctatcaagtctgccattgccaactactacaccaagaaccccaacacccgtaccacagatctgtccgggacgggcggtgtcattcctgacgttaaggttgagactgtcaacagcccttctgcttccctttaaattcatttttgatttgatttgacggtgtgacgctctcggatggattctccatctgaatgacgcaaccccactcgttccgtttcacgaactctgcgatttttaattccgaggttgtcttaatacacaatcatttgatcaaggatgctgttgttttgtcggagagaatcgacaagaacgggtgtacttggagttcgttgtacttggtgtcgctgaaaatgtgtaccaagagatgacgatggatgagatgaaaacgaacaaattgaccatttgtttgatgtacatattttctttttttagtttcacgttctcatacgttgtgtcttgttctttttttttttttttctgcgatggcgcctcggggatccttgatcgatactctcatctctttcgaaaacagcgcgccttgatagtttccaatgaaacagtgaacccagaacagtcaccctctgtaaaagtagagtaatatcagaagcagtctatgattcatgatttatccacaatctatctatttgtacaagaccacactgggtctgcgagaacaccgcataacgaagccccaaacatagcacaatccacccttcaacaatatagccaagagctgaagaggccacatgcgaaaagaaatatagaacgccatcgctgatgcacagacagaccactcaagacaatccaatccgtgccaatgaaccaagggacaaaacaagggatataatggaataaagaagaaagacaccgagcgcaagccatccctcccaaaaaagaacattgtctaaacgctccggaggccgaagcgagacttcaaggacaacacagtctcataaaccgacaatttgacctcaacacgaaggtagctcgcgtaggcccacaggaagcggaagaagttgcggaagacaccgccagactcgttgatgagatctaactgctcttcgaaaacggttcgtgtggcatatcgcgcgaggatgaggaaagagcgcattgggccctggcgtgtgtgtaggttttcgtctaggctgcgagctggggaggggttagtcgatgataatccaaaagaagagagggtcgaaagcgaagtacatactaaggtcattggtcttcaagatgagaagaataatccgtggaacctggcctagcaagacaaccagctgttgtagcatgccctcacccaatgcaccagaaatatcatccttctctttagccgtccgcggggagacgacgctttccttcgtgataacgctgtagtctcgaccagtaatggcgctggcaaagagcggaaattgcttgtccgtgacgccggcgaccttgtatgcgaattcgcgcatccgtggcacgtccccatcgataacggctagccatagcttggcgtagttgcggcgcaggtcgcggtcgatgttgcggtagagcccgtggtcatagaggacgacgtcgaagttggggtgtgagcgggtgtggttcggacggatggcgatgttgccgccgtgaggatcacagtggagtggagcgttgtcgccgaagatcatttcgttgaagatgtgcgcgagggcggcggagacttcgtcacggtcgatgtggttggcatctagatacgccaggtcgtcggggcggtggcctgcaatgtactccatgacgaggatacgtctttgagaccacatcacttgaatctagttagcctcaggttacacatataaagacagagtcggcagcattacaaaccttcaggaatgaccagcggggcatcggtgtgctttttgaagtactcgctggcatgagtagcattctgggcttccatgcggaagtccagttcttgcggcagcgagaagtccatttccttagacaaccattccaggtcgtagtcagggaagaagcgcttcagcatggagaaagtgaatcgagtcaaagccaagtccagcggcacccattcgtccagcgcgggatgctgcactttaacagcgaccttctgtccagtttccttcaacgtagcaatgtgcacctgtgccagcgatgcagcaccgatgggcttctcttcaaaagaggcgaacaactcattcatactctgccctgtgtccttccggaacaactcgtcaattgactcaattgacgaaacggggcatcggtcctggagcgggatgaaggtcgaggtccattcgatgggaagcaggtagcccatgctgctgaggtgctggcccaatttgatgaaaatcgatccattcttttctaggacatggagtgtacgctcggcacatcgcttgtggcatgcgtgaatcagtgcgttatgttcttcgggggacaaggcggcttgtttgagggtaacacggtagctgcgaagatttgaggttgcgtcagcaattttgtcaaggcacagcatatagaaggcccacagggtccccacgcctcacttactcgttgatacagacagctagtgcgcctacaacgcgcccactgcgtttggccgcacccaacgcatgctgcgcttgatcggagaacgtcactgtgcccagaccgaggatacttccaatgataaaccactttatcatactccgctgcgatgcattcatattaggctcattttcggacttgtgctggctcttagcctccgcagacaagagaggcgaagccttgacagagaaagaacggctcgaagaggcgagggtcgagccgtgggaagacaccgagcgagtccatgacgaagtattgattctaccaaaggagggcgagtgtcgtagcagcgagttcgaggctagaagaaacgaggatccagatgtcgagggtttggatgtcaccgtagcgggatcaatcttgaatgtccgcaacgacacgcgaagcgctgcgctcatcccgaagcgaaggccaccggccagaaaaaaaccaaagaaaagaggaaatgactgatagtgcttgttggcgtttctgggctcaatccatcgtatgattctctgtcggctcagagagatttttcacggttctcgccgccaatcggcttcgatgctgcacgtgatccgatatagatcagcccataacagacgtcatagctaatttggcgtcgaatgcatttggacaaggcgtttgactggtagatctgatagtgaagcaagcatccaaacggattgtgaaggtgtatcgtaaaagaaacagagaaaatgggataaaaaccgtatatcaatggctggccttaagccgccaacaatacaatgatgcctatactatgtctatgagcctatgtcaagtacacttatgcaaattagaataattattgattcgaacaaaaaaaacatagactctatgtgcagcaaccagtgctcacataataacaagaagggttttacaaacagtaaaaccatgcaccatcactccaaagtccattttagagttgacaacgccgttgcctgagtatgaaccaggctaggatgacctagagaaattgaaacgtaataacacaaacatgtaaattcgcagtagaacctttggacgtcaaactacgtccactcaggctctgcgagtgttgggcggcggcgacgaggaatgattgaaggccgccgactcaggcttggagtcttgttgtcttcctcacgcagtaagtcaacgtgactcagtctattagagaggggccgtgttgacctgggcctgctagcgaccgcagagcttccattggcgacagatccaagaactggattgctgccatcccgactgccaggtctcatgaccagagaagaaacgatgagagagttgcgcgggtgtcggggagtatcccgaccttccaggtatccccttgactggccgcggttggctgagggtgtggatggggtagaggttgccgagaataagattggaggggtagtgcatgtgctttgtcgtcgggctgtcggtctgcgtttgctgacgccatacgcttcgctggatcgaaccagcttgcctgccatatcccttacgaggactgcggggtcgttttccatgttccgaatagcgtcgagaagaccataggttgcgagtagcccaccttgctcttcatttgaatcgcaaatactggctattatgcgcaaaaggttgagtcggacggcagctttggcgtgatgcagcttctgcctcagtctctggaagatatcaggccgcgcaaaagtggatgcgacaggaggactgagccgaagaagcttttgcagaggttcgagagtgttttcgaatgcgttagctttggaaagcttcaaacattccgcaatggcaccagtaaatgtaatggggccctcaaacgtatcactctcaaatatgccatccaagagatgctcttcaaccttggcggtttcttcttgaagcctaattattattcattgtcagctttgggaccagtcacgctttcagaacgggagacaaaccatgtaaaaatagcatccaaggcagtgacttgccaatatggatccaagagcaaagagatgtagaagcccaggcccttgttgcgccatagctccctacggccaacttttccagattgtgccatgtcgcagagaattggtagggcaaactcttttagcggccgctctgtaagtacgatcttttgcagaagcgggacaatgccgttcagtgcagcatcttcttgcctagacttgtttaggcggcacatattgtagatggtgttgaggatctggttcgagagctcgcggaaatgcgattttctcagatttgatcgaagcagatcggtcaagacatcgatggcgttggaattctggagcgaatctagagtagttgaaagcatcgacaggtttttgatgaatttcaacatcgtaatctgatggactgggctcattcgtctcaattctttcaagaccccttgaatcaattgttagcatagaacgttgcaagggttgttaggcggatgattcttactgtgcaagactgttcgttcagaaaccatctccttaacatgattctcggcctgcgagaatatgaagaagatattagcaatacgaccctcgataacttctgtcaactccccatcttcatcgagagcacgactgagaacaagagacaggggatcaaggacggagttgcgggataggattctacagaaatcgttcttgggagtggagccctaaagaaaatggttagatccgaggagatgcaaagtgcaatgaaggcgaagtacttacttgcagctcaaagacactccagattccgttcacaccaatcaagactagttcacgttcatcttcataatcatcctcgaggaactcgaccaggacattcaaacctccagcactgacgaacatctggagagtcaaggtagaagtctggtacatctgctgcacgaaagccgcagcctcgaggcgaatttcgcgggggtacttcttggatgcaaactcattgatgatagggattccaccgacgaagcaaaggttttcctggacctcatagtcatcgtagatgatcgcgttgacaaccctcaacagacagaggacaatatcacgccggcgagtagtgtcaagaatctcgagaattggcagcatgccgtgagcactgatgatgatgtttttagtctctgggaggtcacagaaaattgtgaacaattgatcagaaatctctgcaagaacctcttcgtcttgggatgttttgagagagtccacaagaccctcaacttggttgcgaagacgtgcgtatttatcgcgcgcaatattttcttcgaggtcgacctcatcaaagccttcttctaattgcgcaaaggggtcatcttcgtcttcttgatctcctagccaagagttggacagcttcgagttgagcatcaatgtactttgatctgaaccatcgtcgctctctgtcagatcaagggtagcttggtcggctccaagaatatcagagaagtcctcatcgttctcattctcagcaaacctctggatctcaatggtagagcggtcgcgcttcacagaaagctgtttgcgcagctggggatgctgaccaccaaaatcgtcatctacttggttgtatcctatgttttcatgaatgggtgatgatggatcatcctcggagtcctggaaaatgttagaataatacggtgaacttatagtcttgccggagactgtacctgataaacacccagctttcgatcgagtacatcctcattggccataatgagatctgaataatcatcgacagagttctctttatagagattggtcgcacgaggaggcggacgagtgcgtctcggcatcggattttgggagaggattgggacattttgcagtgcagaaatagggacattggatccgggctggtagaccgcagggctttgagacttggaaggctctactacattatgtttgatgggatatgggcgaattgtctgcaagtcgtcgtccgagaagcctgagttatcctcaaaggggtcagaactatcatccgatttgagtatggtcccatcgagtgaagcaaaagctttaagtctctcagaagagagcatgccaccgaagttatcatgtggccgtagatgcggcaacttgagtgcgctaggagagattgcagtagcaaagtcatcgtcccaattgtcatcccctgctgagacaggtgagcgaaagcgatccgtgggtttcatagaggttggcgatggcagggtgtcgaccaatgggttattccgggtagatggcaggcctgaagtactggggtggtctggtctctgcttcttctttgaagtccccgcttcgggggaccgcaaagcctcgttccattcttggacactcttgacggcttcttcatattctgtggactttttggggatcacagattcggttctgcgcgcatttacaatccaaggatgtttaagcaactttcttgctgagactcgaaggttggggtctttctggaaacattgcataaggaagtctttcacagcctagataaaagtcagtcttgcatgcatatgttgaaacgatcgataaagacgtaccggcgaggcaccctgcgaaaatggagggtgatcatcgtttacaatacgaaatagtgctggcataggctgcatgttatgatacgggggtttcccctcgagtagctcgatgacagtgcatcctaaactccagatatcggaagctgttgttgcgcctgaaagctcgattacctcaggggccatccagtacggtgtaccaaccacgcttgattcactcaagcccgtggtccgactcgccacaccaaaatctgcaagcttgacgagtccttcttttgtggttagaatgtttgcacccttgatgtctcggtgaataacaccctgttcatgcaagtagagtaaaccatgaagaacctgggacatataaagacccacaaggttctcggggaaacgaccaaagttcttcgcgatggaatgcaacgagccattttcgcaatatctataagacattaattctatgttcccttgaatttgacccgggagagacatactcgagaatgatattcagagtttcgacggatttcacaaatccatggtacttcacaatgttcgggtgctgcaagaatctatatcagtacggtgtttgttgacatagcttgacggggttgtctcacatcgagatttttgagaagatcgatttcaagctgttgcgtcgcatgttagcagatcagacgaactccgagaacgattagatcccataccatgataacgcgcaattcactcttgggaaggtctgtcaacttgatttgcttgacagcgacagtctccccagtattccaattcaacgcgcgatacacggagccgaaagctcctttgcctaagcagtctcccaattgctagcatcaacacccaatgtcagcatctgcccaatccatattttgcggggaaacagggcaccatattcatacgtagtccttgagctctgcaacatcttttgccgacgacttcaaaactttatcatccttcggtttctcttctcgcttcgtaggactcgttccgactcgtgtcaatcgcggctttatcggggttccgggggttctcgaggatggggtgagggggcgaggctgctgcccttcgctcccttcgccgggccgagcgaccatgatgcagcaagctaggatcaaatgtatcctagtatgtgttcgagttggctgtcggtctcacgatgtggtttgatggagggggtggggtgaaagctgaggaaggaggcaaccttagaagagctgatcgcaacggtctcagaggtcatgtccacaggatctggcaaacataattggcaattagtccgagtctatcaaggcacaaacaagcatcacaagagacgttcgcgtgcggtcgttgtggggaaagtctcaccaagtgcacattacagcacttcagctctcacgccctagagagctgtttccacgacaagtcgaggtgcatgtaaggtcttcagatggtagcaattaccatgcagaattctgaagaatagcgacctagtagaggtgacaatagaatgtgaaagagggttgttcgcaaagaatcgttgttgttttgaactttcgttctccacccgccgcatcatgcaggctgtgctggacaatcgccgatcagccctgccataccattttggtagatttttattatttgaccaaaaggatcacaatatcttgatgtatagctgtactttactaagaggaatgagaggtagaaaatgaaataacgcttgttgttgctgtggggttatttaccgctatagatcggggaaatccaatctgatctatacagggtatcatttttgggcacggagaaggcgcattacatctgaaacaaggtacaaactaccagcaataacaagaggacccccttgagactgctcactagcccaccgaagggcaggcagtaaatctccttcgaagctctggacttggccaatattttggatagcttcgatggaggaggcaagctctttggcgttagttggtcggacccagggcatcccgtccacgggaccaaattcggcggtggcgactcggtctccgggccggataatcgaaccaaaaaccccagctagatcctttccacttgacgcggcaacaacccaagtcacaggttggccttgaaaacgcattttgcggtccacatacttgccgagaacttcggcagattgagcattgtgggcaccatcaagcaggataggctctgcacggccaatcaaaggttggaggtcaattttttgcaaacggcctggccatgttacgtcggccagatatggaagcaacgagaatgcatccatctcaggtcgtagttgagaaagggcaagacgaagtgcggacactgcgcaacacatgttttcttgttggtgaggctctagatcaagcttctggaagtaagatgcaagtgccggaatttgttcggaaaccgttgcgggagagacaaacaaggaatcaatacccagttctcgaatgcgtgccctcacagtttcaatcacttccggactgtttgtattgtctaccacacaagggactccaggcttgaggattcccgccttctcacgggcaatctccctaattgttgttccaaggaaagcctggtggtccacccctatctttgtaatgaccgagacgagaacattattcaagatatttgttgcatccaggcggcctcccatacccacctcaaccacaccgacttcgacccgttcatggttgaatatctcgaacgccgttgcggtcaacaactcgaattcggaggcaccgatgcctagggtttgatctcgtagtctgacttggtcttcaatctgtcggaaaagggattctttgaccactttctctccaattgtaatacagtcccaccgatcaattaaatgcggggaggtgaagcggccacaacgcactccgccggtggacagcaaatgggaaaggtaggcactgatagatcctttcccgttggttccagcaatgtgaatggccttccatgagagcgtagtctgctgaagcagactcgcgacccgactcaatcccaactcaatcattcctccaagtgtgacgtgataggaatttcgaggtcaattgtcgaggtcaattgtcgaggtcaattgtcgaggtcaattgtcgaggtcaattcattatcgcccgaaggattagggagcgacaagatgattcaggatttcaatgcttcattgtcaataagtaaagcagagcccgaatgcgcgtagcccaccttccaaagtcggagcttaatcggaggaataaccccacgtgacattctcattcgcatacttccgatatgatgctctccgttctttactgacaatgggagaagtttttataatatccacccatttaccagttaactcaatcaagggcatttatacttattgattgtcaatcgagacattgcacgaataggctattgaaagatgtctagacaagtcacacgtgacctagccattctagccatcacaacctcaggcattcacaactctaaaaatccaatcgatctctcccgtctccatctcccatctccaccgttatcgcatgtcgcgtcctaattccataattgccttttcggtctttatttgtccttatttattaaacctctttgtttacctgcctttctttctgccccaaaagtaaaatgggtatcccgtaagtcatccattcctcacgtgggcgcgcgaagctatcgcatgcgccactgtttcgaggcataatgttgacttgatctacagtatgtggcgtgagcctcccaagtccgaagcattcaagtccacatcagaaaaggacacttctgctactgcacgctcatcgattcgccgagcaccgtcgcgaaacactagctcccgcgtgcgccgtgccgatatcctggcttcgtttcattcacagatcattgatgagctccgacgcggcgccgtggaacctagacgtgtgccgcgcttttctttcattgcgccgaacgggaatgtcgacaatgcagtggctgtggaaccggccgatcgtgtggccctcagcagctgggctcggtcggaagccgcaagtacaaaccgacagacagatacaacagtagccaatcagctgttcagaaatcatcgcgatcaagccttggccgagcttttcggtcgcatggacggtcagcccggtaacaccaatgccggtccttcattgactcccaacttcgctcccgctatcgcataccacaccagcgcttcgtcgactccttcggacagcggccttcgtctcccccctatgcgtgagagatacaacagtgatcgcacctctaatacctcattcccacccgagatccctgaataccggtctaacaatacacaaacccggccaaaccgagaccccgtcgtagacgggcttggggatcgccaacgcagtcccagtccagacgaagagcgggaaagcgttgtgtgggagactttactctcaaccattgcacccgatgagactcttccatcaactaatacttctttcacttcaacttctgctgccgttccagatatttcgcgcaaccctcgtcctcgcagctctgtcaacttgacgcagccgatgaccgcggaagctgctcgtactcacttcggacttgacccttatcctgaccaactcaatccttgcgacttctcttccgatgatgaggaacctccctctactctccaggaattcattggacgacgacgggcaggccgttatcctgatcagcattcgactatgagcaaccatcctcctgttcctatccctacaatcatccctgcaagcgttcttgctctctctgacgcgcgccgccaaaattcctctctctccgatcgtcaccagaacgatgacctccaccacatgcaggtcatcctggaccgacttgctcgtcgtgaggatattcccgacgactggtgggctgcggctggcctcgcacgcactctcgaccgtggttccagtgcgagcatggactccactgacaccgagggcgcatcccgaaccaaccgcgacaattgaacactgctagtcatgtggtgatgctgaatgatacgagatttgatattggcgatattggaaatgggcgttttccggcggatctcacgggtttttaatttgaatatcggcgttgacaggtcctttcgaggctgctttgtaatcttacattttccggtttccttgtcgattattggacaaacggacacgaacggccacctcgggggtcttttcaatattatctgtcctcaacttttcccttctgtaactttttatatcttcggggattctgattcttccactgtccagacataaatagaacatatttactttcggtgcctgccaagtccagtgacgtatatctctcggagtacagcagtccccacttggagagccccgccaatatgtgaggtcgggggaaattatgcttagtccaacaactcaaagaggcaaataacatacaaagtagttagatccagtgtcaaaaattgccttgtacactgatctgcaacactcaagcgtactacaacacgttgctcaaaccaattcagggcgttccttccctcggatatttcttatcatacacatttgatcccagcgtgaccactagccaactatggatcaacaggtagaccgactggtcaacaagacctggggtgagtagatccaagaacaagcacaagctcgaattactcctgctatcccaccccaccatcaacgctacaaccacgtccaactaacaacccatcccagcaaaactctgctcaacagcagacgacgcgcgcctaatgatcgccatcagcgggattccaggatctggcaagacaggtctagcaacgatgatggcagcgcggattaacaaaatctacgcctcggaaaaccccacaatgccaacaccaatagccatcgccctcccaatggacgggtaccacctgacacgcgcacagctagccgccatgccggacccggtgaatgcggcagcacgacgaggtgcggcgtttactttcgacggcaagaaattcctcgagcttgtgcaggctctgcgagagccgcttacgggccggacgggaagtctctatgcgccgagctttgaccatgctattaaggatccggttgatggggatattgccatcccggcgagttgtcgagtgctgttttttgaggggaattatcttagcttggatcaggagccgtggaaaacggctgcttcgttgatggatgagctttggtttgtggatgttgattttgaggttgcgaggaagaggttggtggttaggcatgttaaggcggggattgcgagggatgaggttgaggcggataagagggctagagagaatgacttggttaatgggagggagattgtggatcataggttgccggtgcaggaggttgtttctagtatttttgatcctgtttgggagaaatgggcaatgtgatcttgacgaaggctatgatgtacagagttattactatgttgatttgagtatccttgtgttattaggaattcaaaacacgtccagcgactatatccttggcataggaaatagctcggacggattctgtgaatttgtgaaggacaaaaagtccgatagaaagatgatagcaaagtgggttttaaagtcgtactagactttctcatagagacatactcggtccctacgatgtatacatatcgatatgctctacagattgcatattttgaagtagtagtaacacactagctgtttcgcgagatcgatatccacccatcttggtctatagttatcgagatactagctctataacccccagcactagcgtaagtgaaacccttcttaactcgacgtttagatactgatggatcccggcttctcctatcatgacgccgatttgactatgtggtttctagcccatggagcaaaccctaaccagcgatgtggtaaagatcgcaccacactgtctaccgcttttcaagttgccagcttcgagatcattcagaagcttcttgaacacggtgtcgatgtattccaaggccaggtgctgcattatgcggcaagacgccgattggatgatcgactccaagttctcgatttcctccttgagaaaggtctaccgatcaacaacatcatgtttctgtactccgatgactattacgccaatatgtttgacggtattggtactccgcttcattatgcggctgatgcgggtctacttgacctgtcaaatatctggttgagagaggagcgtcagcaagaatccgagatcccgcaggacgaatcgctctcaactgggccgaattcaacaaccacaaggccgtaactgattttttcgtccattgtctgttgagaatgaccaacatctcgttgcacaatttacagatgaacctgggcgccactttacccttaatggaggaattcatggcaaaaaacgactactacttcgttaacatttagttacatgatttttcggggtttcttgaactcgttatagttgaatagtccgatatatgttcattctactatgacagccgatcgtctgacacacaggcgcactggttatccggatatatgttgtagtatatcatcatccgcagtacactcccgcaaaaggaacatcatcaaggcggcaaaatgacatcctcatcttatcaccacctcccatcatcgaccagagatcgaagagggtatatatccaacatttcatctaccccggaaatttgtcatactgatccacaatcgggcatgcttcaagaacctttacacatcgaagctctttatcggaataatccaggcttccatcttcaagggtctcgattggtgcacctttcagcgtttgcagagattcttcattgataatcatgcacattcgccatttggtccaaccgtcacgcatgccttgagtgtccacccaggcctcaaataagcacgaattgcttcgagagacgccccgttaaattgcgccggattttgcaagatggtcgaccgctgtttggcccagatttcattaggctcatttggtggatattctttggtttcttggaagaattcttgcttgaaacaggcctcaataaaccgaatagcgtctggaaatagagtatctgaatcagcggagtaggtagtgcgatatatgacaaatccccagtctgggtaagtgccgaggttatctcggagctcgtccatgttgaattaattgttttaatcgcgattgcgtagaatttgagttggtggttgaggaggaaagagatgaggaagggaaagaaagtctggagtcttctgccaaattgtcgttacagctccccaaccacgaacccacatcaccaggcttgggacctgctagatctgttacatggttggcttcgtggcactcgatatgtgtctagcttggacagcgaaccacacaggccaggagaaaatgatccgtctgtatcaagcatgaagaaataactatatctatcctatattccggcactttatcctagctgcagacattatagattgtactcagagtggtgtgcacgagcaagagagagaatagatcactggcgtatggaactcaggatcgagaacctggaaccgtccctatggggatcagctgtcgaagtccatataccaaaagtaaaaagggtacaggtcagacatgtgaaaagaattagttcgatgaacaagcacagcgactactttaattaagagaaagagtccaaacgcaaacagcgtgtcttaccccacaaagaaatggcaaaaaaggacattcccatccagtgcctggggttatactcccaggtcgccacttaggggatcataatgcttaagtaaccccaaccagctttaccctaagatctagtcgtccccaactgcaggcacacattgtcggacctccacagcgcgcgtatcgatctcgcgcgctccagcgggtccagaccggtaccagcaaggtgggcaattaggggagcataattggaacatttatgaccgtgcactgggtgggtcgaacgctggcagctaggacctaaactagcattgaaaacgcatgtcaacacactcagccactgggggaatgtcggttagggggaaggtgttgctatgaaatatataggaacaaacacttcctaaaggggaaggtgggtccgctccaccacattgcttatcacgtgatgatgtctgaatgtactatgaagaatgaatccttgtaatatacatcgtttaatccaaaaaggtatagacctacacataatgaaatcgtggaatggtaaagcgaagtggccgctctacttttcacttctccctcacttgaccttttctccttctctcacttgaccttttctccttcttctcgccttctcatcttctgttgggtgcccgaactttcaacttttaggacgagtccggtatcctcctcataaccggcgaggcgtcctttccacgcccttggtgcggccttattgatcatcctgggccttttcctcattcagagatacctccctcgcgcgtatcaataccctttcatacacctcttagtcttcgactgaagggaagcgagaaccggtgaacaaggatgggaaccgtctcaacacctcttactttatatatgcctcgagtgcataaagcagatacctggaagttcctgcgcaacttagacagcgttggtctgaacttgaacctgaacctgaaaatcgtcgaataccttcaagaacacctcaccatggtttctctcctgatctaccagctttttaccccgagctattgacctctggggatccccggtgtaccagaagcttaacccacacttcgaagcccccggctataatgaataaggtccttcgatctaagaatgactttctgactgattaccaagaagcttccatgagacagagctggttttttcctcgggaccacacatcggttttcttcgcctattgtcgaaaatattatgcacacaatgatcttgactgtttcgaccagtcatatatctagtatcggcgttgatggatgctagtattttcgcgattattgagtttatggatttaaggctggcttcaatcaatgtgagggagcatattacatagcttacataagctctaggtggttacaccgagagcgtacagtcatgtttcatgagtatttgcaccccagtacttcggggggggggggggccttnnnnnnnnnnnnnnnnnnnnnnnnnnnnnnnnnnnnnnnnnnnnnnnnnnnnnnnnnnnnnnnnnnnnnnnnnnnnnnnnnnnnnnnnnnnnnnnnnnnnnnnnnnnnnnnnnnnnnnnnnnnnnnnnnnnnnnnnnnnnnnnnnnnnnnnnnnnnnnnnnnnnnnnnnnnnnnnnnnnnnnnnnnnnnnnnnnnnnnnnnnnnnnnnnnnnnnnnnnnnnnnnnnnnnnnnnnnnnnnnnnnnnnnnnnnnnnnnnnnnnnnnnnnnnnnnnnnnnnnnnnnnnnnnnnnnnnnnnnnnnnnnnnnnnnnnnnnnnnnnnnnnnnnnnnnnnnnnnnnnnnnnnnnnnnnnnnnnnnnnnnnnnnnnnnnnnnnnnnnnnnnnnnnnnnnnnnnnnnnnnnnnnnnnnnnnnnnnnnnnnnnnnnnnnnnnnnnnnnnnnnnnnnnnnnnnnnnnnnnnnnnttcttgcttacttgcttgcttacttgcttgcttacttgcttacttgcttacttgcttgcttacttgcttacttgcttgcttacctacttagttacttgcttacttgcttgcttacttgcttaaatggcctgcagccggcatagtggctataccgcggtttaattatttaattatttaattggttgattgtttacttggttaaagggtggctacgcaatggccgcctaatttagggtaacgtaattcccggccgagctgcgcagcccagaacacatacagtcatgtttcatgagtatttgcaccctagtacttcgggggggggccctattttctgccggaaaaacttcgtactcactcccagccagtcgcactatgcgggtggctcctataataataggaataggcaggcggtattcacagagcggtcaatggtagaggtaccggggtacaaatactcatgcaacgccactgtagacaacatcaataacaagcatctttaccaccaccaagctttttccataacagattggtagcatgtccaggccttgacatacccgcgcaagatgccgacattctacagctagtcccatgggcggcaatgtacggtatcattgactctttcgggaatgaaaatgtccgccgacgcaagcgcgcgcgccgagagaaggagcgccatgataattctatatctaatacacacattccgtcctggagaagggtcgccatatcgaagcccctctctggcccgctacaaaatacagagctgcgcttccgtatcagtcagattgacagtgccccagacgtcgtcggtcctgttatatccctcctgctggcagtagaggccttgtttcagaacgtcggtggctctaggaggctggaacgtattgcctctctaggccacgccggcctcgtcgacttccgcgcgcgtttcgtcgagggagacccccgcgttacccgcgctatgcgtgaggggctcggcacctcactgaacgccatccgcgacgccatagcatttgctgagggcctgctgctagttgaccgatgcattgagatggtaaaggatgatgccgtaaggcttgaggtcgaagccatagcatccatgatgcgacctccaccggaaactcctttgcacgaaggccacttgatttctaactgaggctgccgaggacggcagcaccctttccgaagggggcacatgtgagagagcatattacatagcttacataagctctagttggttacacctagagcgtagacaacatcaacaagcatctttatcaccaccaagctttttccataacaatcaataacgcctgtgtgcggatcgggaggtttaccagagaggccgtgaatggttcaaaacaattggcaagcgagttcggaagtcacttttcccacggagaaaggatagaacaagagattcaacttcttatgagaatgccactatggtttagctctcgctaagtttgctgttatcattaccattcttcgacactttcgcggctttttgaccacattctgggattgtctcttgcttgatttcgtggctttctccgtgagtgagacctgtatcctatgttctgtggctaaatatactgtgcttacatttgatgcacgtagttggtcttgagatgcttcgcctcccttcctccgaggaagtttatacgggcatgtcacgaccagagccgggaaaaccccggataagcacatcaattctcgaatgtgataacccttggctgtctataactccaagagtatataatttgttacactcgaggtaactatgggtaactgaggttattaatagagctcgaatcctctaatccccatctggatccgccatctaagacatataaaattagtgggaaaaaaaagaggaaaactctcatcttatgtagaaccgtacagaataccattaaatgaatattttcaaattttacctcgagcaccactgtcattgatacgctcacaccgtaagaggaacggaggcgcttctctcctgtatccggggacaggtccctgacgctaaacctctttgggagccgaagttccacaagccatggggaactagtatacggtacgaagagaaccgtattgtaaagtacacttagtattgaacacccgcaatgaagtacattactgtacagatatgaatgtaatataacagaccctgacccccatcgtggctttgagattgtgatgaaactgtggttgcccgatttccccttcccccccgttttcctctggttgagaccttatcctccttaccacttcgtcactctttgtcttccactttcccacactctttacagtcgctctttagcccacacgttcttttactctagactcgctgtgcgatcttgaatccaatcccttatccaatttccaatttgtgatttcgatctccgacctctaatctttcaccatgctcttcaacaagtctatcttcgccgtggccattgtggctttggctaatgttgtgactgccaccaccgtgcaaaccccggcctgtgttctcaaaatcatcgggtatgtcccgaaggaatggaaggaatgctagtggagtcctgagctgatgacatctagcaaccaagccaacccggccgattcgaagactatctgcggctcgagcgctagcaagatccagtctgatatttccaagaactgtgccgatagccaggcttccctgaaattcttcgtcaacaactgcgccctgctcggccacaaagttggtaaggatcgacacatccaagagcatgttgcactatatcactgaatcggttacttattatcttctctttagtggctgatgtttccaccactactggcacctctgatatctctactgccaccggcactgctgggggctctacagccaccggcttcgtcaccgctgtctcctctgtctctgctaccaagactggtgcttccgttgctactggcactgcctccaaccctgctactggtacctcggcgatcagcactggcaccgcctccgagtctggtgtcgtcgcgtccgcttctccgactttcaacgccgctgcgtccgaccgccacttctccgccaccagctttgttgccgtggtgttcctcggcgctgctgctttgctgtaagaattcagcattaactgacagcggctcaacgtgaatatcgatgtgagcatattattagccttaattttgctcctttcgatctgaattgaatcgttgttcagggatcttgttcgaattctgatatgttgctcgtctatgtcaatatttgaactccgtgaacttttatcttcttacttgccaaaatcgcattgatttatgtgctattcacttccccagaacaattcttgaaaccgccgaggtctgctcaattgccaatcagtcggtcgatgtaaacagattcaaatgaatcagtgaccaaaatgccaggacattccctaatagaagagaacgagcaatacggagtacatccgaagtactcctgcggtcatccccgcacctcttggccccttgattaaaaggacgatgtagatctatcacattgacgtgtacaatgcggcaaggctccaaggttgggatcgggcatgatgttgactaagacatatggataaatatcacgctgtcaaaaatcacctcaatttcgtaatgacgtttaaagatcatctgagccggaatgcttcaggccgctcggcgacagctcttccgttgccatgttgccatgcgcgatccttcgcgtgttcacgtgaccattcgcgatctgcagtttggctgcaaacctaatctcaccgcctattctctagtcacaccgccttccctattctaactagaaaccccacgctaaggccattcggatcaagacgctaactgcaaatggtataaatggatgtttctgcctggcaggatgcaggtttgcaaggaaaggtggacccgatcttggtaagctgaaaaaacgcgggcaacgcgaaaagacaacgcgtccactcggcaaccaaagattcctctgcccctctgatctctttcttcttctcacacccctctacgggcttcatacattcatctttccccctttctctatattctaatagcatctcaatcctcctactactttgactttgataccctgttctcgtctttctattatttcaactaccaacttatcactattcaaaatgtttgtctacaagagaggtaagtgcatatatggtcttctgatacacggaagcattcgtggcaagagatagcttctgctccttcatctcgccacagctacctggctttgccacgccactgtttttggatcgacggctaacgcggatacaaactgcagatggacgcaaggaacgcgtgcagttcgacaagatcaccgcacgtgtctcgaggctctgttatggcctcgaccccgagcacgttgatgccgcagccatcacccagaaggtcatctctggtgtctaccagggtgttggcaccgtggagctggacaacttggtatgttcacttgcttgccccgacttatggcattatgttaatgtttcaatcctaggctgctgagactgctgcatacatgaccgttacacaccccgactacgccattctggctgcacgtatcgccgtttccaacctccacaagcaaacaaaaaagcaattctccatggtcatctccgatctctaccattatgtcaaccccaaaaacaataagcccgctcctatgatctcagatgaacactacgagatcgttatgaagcatgccgaggagctcaactcggctattgtgtacgaccgtgacttcaactacaactacttcggatttaagaccctcgagcggtcataccttcttcggattaacggcaatgttgctgagcgtcctcagcacttgctgatgcgtgttgctgtcggaattcacggcgaggacattgagaaggccattgagacataccacttgatgtcccaaaagtacttcactcacgcctcccccactctgttcaatgccgctactccccaaccccagctcgcatcttgcttcctggttgacgtgagcgcagacagcattgagggtatttatgatactctcaagacctgtgccatgatctccaagaccgctggtggtatcggtctcaatgtccaccgcattcgcgctaccggttcttacattgctggaaccaacggctcctccaacggtattgttcctatgctgcgtgtgtttaacaacaccgcacgttatgtggaccagggtggtaacaagcgccccggtgcctttgccatctacctggagccgtggcacgccgatgtcttcgagttcctcgatctgcgcaagaatcacggtaaggaggaggttcgcgctcgtgaccttttctacgctctgtggacccccgatctcttcatgaagcgcgtcgaggccaacggtgactggacgctcttctgccccaatgaggcccctggcctagctgatgtctacggtgatgagttcgaggctctctacgccaagtacgagcaggagggccgtggccgcaagaccatcaaggctcagaagctctggtacgccattctcgaggcccagactgagactggtaaccccttcatgctctacaaggatgcttgcaacaagaagagtaaccagaagaacctgggtactattcgcagctctaacctgtgcactgagattatcgagtacagtgcccctgatgaggtggctgtttgcaacctggcttctctcgccctccccacctatgtcgactctgcgcgaggcgagtatgatttcggcaagctccacgaggtcgtccaggttctcgtgcacaatctgaacaagatcattgatatcaactactaccccgttcctgaggcgaagaagagcaacttccgtcaccgccccatcgctctcggtgtcaacggtcttgctgatgctttcctggctctgcgtctgccgttcgactctcccgaggccagacaactcaacatccagatcttcgagaccatctaccacggtgccttgactgcttccgccgagattgccaagaagctgggtccctatgagacttaccctggctctcccgtctcgcagggcatcctgcagtacgacatgtgggaccgcacccctaccgatctctgggactgggcctccctgaaggccaagattgccgagactggtgtccgcaacagtctgttggttgcccccatgcctactgccagtaccagtcaaattctgggcttcaatgagtgcttcgagccttacacctcgaacatctactcccgccgtgttctggctggtgagttccagatcgtcaacccttggctcctgaaggatctggtcgacctcggcctgtggtccgacaacatgaagaaccgtatcatcgccgatggcggctccgtccagaacatccctaacatccccgccgatatcaaggccctgtacaagaccgtttgggagatctcccagcgcaacattctacagatggccgccgatcgcggtgccttcatcgatcagtcgcagtccctcaacatccacttgaaggagcccaccatgggcaagctgaccagcatgcacttcgccggctggaagatgggtttgaagaccggcatgtactacctgcgtaccatggccgcctccgcccccatccagttcaccgttgatcaggagcagctcctggtcgaggacaccaacatcgctcgctctaagaagcgtactggtgctgccggtgcctccgtttactcggctattccccgtaccaatggtgctgagcccgctatcgccaaggccgtcgcccctgtcgaggaaacccctcgcagtgtggctgcacctgctgtttctgctcctactgccgtggagaccgatgaagttgctgaagctgagcctgaagatgccgaaagtagggcaaaggagggcgatatattctcagatgcggttcttcagtgcagcatcgagaacaaggatgcctgcatcatgtgccagggttaagctttctttccctttaatgcttttggatgtttccttggggctttgtatatggccatgtcttctttcctggcttctcacgtgtactcattatgattttgatggacttttctttttctttgcgtgtttcggcgtcggttcaagatatttcctggattttcttattattacttcaataacgtgttagttatgttcttcattcttctttgtaaactttagtacggagtaggccaagtagatattccttgttgtacaggactagtctcagccttgtatattcaaaccctattatctcattcctaattttaaattgcttaaacttggctgattatttgagtagagctgtgaaagtagaactctcaaatgtcgtttggatgtctaccttgaggcaaagaagagatgatcgagtacctactattggtaacttacttgcaagaatccagccttattgtatataccatacgatttgtcccactataaactgtttatagttatatttacaagcaaggctatagagaacaacaactatgctatcttcaacccattgagtaaacacatatcaacactcccgcccattagatgatctatcttcgtataggccataacatagccgtatcacaacgcataccacccgcgcttcctttcaccgatatggccggtgaggtaactcagcaagatgaggggtcaagctccctccatgcacctctttaggcggtgatggcgggacattatgaaccacccaagggtgtattgtttccggagatatcgttttgccattggagtttcgtatcttaaagtagagcagcacacccaaaatgcatagtatcgggagaccaactccgattccgattccgattgcgatcttttcggtcatggctaactgggatgtttggccagaggctgagatcgacagagacgataaggatgacgatgacggtgaggaggagagcttgatggtcgtatgtggcgtatttgtcgacgcggacgcagatgcagatgtggatgttgttgaagacgcagtagtgctggtagtggcgacaggctcggtgacgttgaagtatgtggaaacaaatccacccttctcatctgggttgatccagagaaagaagacgtttgagtacgacagatcaaatccgtacacctgaacaacccacgtgaagttggtgacatagtcggtggaatgtattttggctagaagacgtgtcaatcaatcatcccgtattttgcagccttgggagtaagtaagtgtcgggaaactaacagaaaatatttccctggctggcggcacctgtctctaccaagctttgctgccagatagagacgttgaatacctcaagcgtggtcttccatgagacaactagcttgtcacctagtgtgaagactggattcacgccagtgttggaggctggatttgtgaaataattgtaatcgtcacctccagccacgagagaagcgacacctgcgaggagcaatatgagaaatctgggatgacgcatgacgaagcgagccacaaggtcaagtctgagaatcgatggggacccgggaattggcggttatagttgatgatatatgagtctcgcgctggtgggctggggggggnnnnnnnnnnnnnnnnnnnnnnnnnnnnnnnnnnnnnnnnnnnnnnnnnnnnnnnnnnnnnnnnnnnnnnnnnnnnnnnnnnnnnnnnnnnnnnnnnnnnnnnnnnnnnnnnnnnnnnnnnnnnnnnnnnnnnnnnnnnnnnnnnnnnnnnnnggggggaatcgaatcatactgaaaaacacacggtccccccagccagagcaggggtgtagatattatgaagaggctaacatgtctctgcattcatctcgtatcgtcgaacggtgagttggttgttttttaagcgccctgagggcaccgggtcgaatttgtgggcaggggctaaggcaagaggccgatgaacggtgcaataagatcccactgattgtttgagtcaagttggatctaactgtatctgtgatcgactcacgctaaagtgacggagaaggcacccgatcagtctatcacggcaaggatagctcggaagattacgattccgaatcgagaatgattgtgaaaacagtaccatgtggatggtacggagtagatggcttctgatgaacaccattaaaactgcctaaaggtattggagtgggccacagtgggctttgggtgccaattcataaaaacctggtgatggtgccagaattagaataggataacgtactttgtttccagctagacgctcagaaacgccaccttgttacatctgatgccccttgggctgaatttcgaaatattccatccttttgttcgtacacggaggagcatactctaagaatgattcccaaatacgtatttagtgccagattgcagagaattcaaaatccacagtctatttcgtacagagtaatgcgttgctattcagtttctctcccattgactagttcctgggctgagggacgtaaacagcccccttttccatcgtgatctcttcaggaataacatccaacacatccacgtcgtcccatgttgcatgaacggtccgttcccccttcaggatacggttgatattaagcattgtgctgtacttcaccccccagctaaaaaagccctctccgtcgccggtctcttcgtggatatcggaggactttgctctcgatcctgcctgatggaagccccccgtgatcgatgggtaaggtgcaaagcaccgcaaaaaaccattaccacacatgcgtccgagcgagacgtcaaactgcgcaccaatgtcaatttcttccgcaagaccagacggatttaccgacagcgccgcgaggatccgttgcgcaccgcggtagctcacagcatagaacattgagcaggcggcgtcgtttgctgtgcacgtaagtcgactgtgatcgggtcgctcgtggccctcgaagaccggagggtcgcgccacagggggagaaagcgatggggcattgggatggtcggatcattcggtgtaaggtagaatggcagatcagtcttacatgacacgccgcagtggcctagccagaggatgtcccagtcgtcgccgtatggcgactgagttgggactttccggttatgtcgaagctggagctggagggttcggacggcgtgagcgaagctctgtagctgcactttgattgagacatcccagtcggcatcgtcttccatgataatcgcactcgctaatctctcctggacaattctaggggatcattaggcgtagtcaaatattgcagtgtcaactacataccgctggagtccgttgatatgcgcccgtcgagcagcgtactcggtcggtttatggccatggtcccagttctgaaacagtcagtcatcgtgcgtagtgtgtaactctagaaagcatacatatggatatgatttagcatctatttcacctggagtcacgccgtcaatccaatcgacgtggaaattgctgacggaagagcctaggacgatattgtcccgcttgtcaggccggctgacaaggttgatggcgaagactttttgaaactaaatagtcgtgagccgaggtatcattaggtgcagctcgaagtgggataatcaccccaagggtttcgtttccgatggcatcgaagttatcccaatcatgatagttgctccagacctgctgggtaggggcgtccgcgccgtgaatgctctctcgtaggttgaaaaggatgaaggcaactccgaatgcgaccagaaggagctgtacaaagcgtaatcggaatgcagaaaagaccatgctcgatcgtcatcgggagacaagataggacgcgttgaatatcccgagcgtgatggaggcgaccgtgatttctgttttcccccagagccgccgaaggtgaatatgtgggctggttatcgacaggggagggagagactagcccttctaatacataaggcgtattgccgaagcatggttggtcgagatattcgttggatccccactgtgatggacttgactagccgcatgaactcgggatttgagggcacatgagtggtatacaaagcgacagtggcgtaccccggtccatgcgctggcagcattattagtactaaatacggagtagacgttaagaatgattgacatggagagcaccgatttaccctgatggccgcgtgggtccaatgatcggcccagaattaccgctggcccccgctgcggcaaagggtcaaattcgatgatgcttagtaatacatatatattttcaccgccggagtttccgtcttgaatattttaaaagtcacctgatctatcaccatgaagcaatttaaattaatccaactaccaccaataatagagataatttgattccgaaaaacctagttgaataccgcctaacggagggactttaattgctcaaatgcgaccgatatttagtcctagtgatagcccaattgcttcgagaggtagtggatcaggtgacatggatattacggtcgcagatcaggtgatctctaaatagttgactagttagatcaggtcaattaaatctacggagtaagcctccccccaacctagcttatccacgttgtatacatgtacgttgctttttggtgaaaccgagtacatattgttgttccatcaacgaagattctacgattcgcgtggcagaaagaaaccgccctgcaggtgcgaatcgacggatttgtaatcatgcaaagtgcccaggtgcaactagccctaacgcccaagcgcgcaaaacgggccacgaaaaggaggctgacacctatattgtaggcagcacctttattttatgaacgagaaaggaatagattcaaaacgtatttcaatatgactctcgggcagcacgccatacgtaatccgccgtcactgcggagtacagctgcagttctactccgcacctcaaattcttcaagtctccagtttcattgccatacggagtatgccgtctaacaatcctattccggggatgtcttcggtcgagtggagcagaggggactggacaaagtggaatggaatagtacggagtatggatgccaaccaaatctccgagttcataccgttggtgccacagggtctaggtccatggttgggcctggaatgtacacggaacaggtattggatgtgtagtcagaactctaggtcattttgattgctcatggtaacatagtcagcaccctgatcgggttgttggtattgattatgcaggttctgttggacaatacaagattattgccctgtgccctgattagggctgagctggaagtgagtctagacaagatcgatagctagagccaagtccatgtattcacacaataatctaagatcggcactattctctcactaaaaactaaaactcgaaagcccagaccagcagtggaggattccaggttaaaggattagattacgtgtataagaatggtatgcaaatgaaatctgccccagtctcagctcagctttgtctcacgcattgtccaatcgaatcggtattggcgcccccgggtcaatacaatacacgtcagactgttaaaaggctgcagtacatgtgtattctgaccagtcctccctggggtgcattgcgaccgtggaaatcaggatacacgtcattttcaaggcgaccgaagagatctgaataataacctttgtgaatccgcaccgtggaagagagcggatatggtatccccctaagaaacttcggaagaaacttagaaaagaaagaaaacgggtgctgtctctgattggcccagtagtcaggtacgagaggcaaaatatgtgggtcgtctgaccccagtaggcagtaggctcgtagcatcggttgaaacagccgtcggtctatccccagaggagattagggccaggagaaaaatggcttatgtggcgcacaagcccctcgtctctggttttcgttccaatgaggatctaccggggcatccggctcgggtactagggaagttagaattgtgatactgtcctccgtcctccgtgtgtagtgtccgatgcaggatatgaggacgacggagaagaatgaaagaaagtgagttgtccatggtacgatcgtggcttgatttggaccatgggttcaggcgataggtgggtccgctagtaacctttgaggtgggccagttttcctctttggtgccctaccgggggcattttataaagtcgagacccttccccccgttttctttcttccttcagtccattccttccttcccgctcactcacgttcctttcgagtgcccgaatcttcctgctgtgcagttgaatcaatcctttaaacaacttcacacaatacactccctcgagtctcttccttcacaatggctcctatcaccaagactctcgccctcgctggcgctttcttcgccttgactggctactcggctcccgtcgccaaacgcgccgtcgtttgggagaccgtcaccgatgtcgtttggaccaccatcgatgtgaccaccaccatctaccctcagtccactaccagtgctgtcgtgcctgtggttgccaccgccgtccctaccactaccgctgttcctgctcctgttgttgtagcgtccaccaaagagcaggaggctgcacccgttaccacctcgaccacctcctccgtcgctaccaccactgctgccgctgttcctactgtggcccctgtcaaggaggaggctgcgcccaccacctcgtccaccactactgctgccgttgtccctaccgttgaggccagtgttcaggaggctgcaccaaccaccacctcctccactgtccccactaccactgccgctccccttgctatcaccctggaggccgatgcctactccgctcccactaccactgcagcggctgagacatcttccaccgctgcctctactgctacccgtgctgccagcgtcgatgttagcagcagcggcggcgcttgctctgaaggctccccttgcgacggtgacatcaccttctacgacactgccaccacttccaccaaccccagctcctgcggcaccaccaacgatggtaccgtcgagaacgttctcgccctgcctcacggtatcatgaccgacagcgactgcggcaagaccgtcaccatcacatacaatggccagaccgctaccggtactgtggtcgacaagtgcatgggttgcgacaacaactccgtcgatctgtcccgtcacttcttcggcgagctggcccccatggacaagggccgtgtttccggtgccaagtggtacatcaactaaacgttgcgtcgaccgcgcgttggtgttgatggccaccattatgaatatgaacaatggacacatctctggtagattgcgcacacggatatggtcttgacgactcttccttttttttcccccttcttctcacttcactgtgatcttttttccccttctttcccggtctctccgagaatcaatcattcatcactcggagagactgggcctttttacctttcgtccactctcttgaccctggatctttttttacgatttcatgtgtccctagtggaccgcattcatattttccccattttcatgttcatagaatcttcttctcttcggagtcttcttgtgcaataccaccctatgatggaccccattcggccatatcacatatccttacgatccctgcgcgcatgctggcaagtcatggacggtttgattctcttgacgagacctcgaacatgcacatgcgacaggcaatgatgattacgatgatcacgctcgtgaaacaaaaaaaaggcatattgcaggagacggatcattgaatgaaacttgtttcgtttgactcgtgtttgctttactgcgtattcgtagtttccaggtatcatttggggagctgtattccgtattgcccctttccacttttgagactcccaaaacggaaatgagctagttatagcaatgcaaggctagtgactatcattacgggtccatgctaagacaacttctcatcacttctagtttgggatgttcaattgcgggcctctctgtccagccaagtgaggctatgcgtatagatatcgtctcaaatttggatctgctgagaagtgccggcgatctctctcctgtctatgatttagccctgagcctcgtcaacgactagcgatcataaagcccagcccaatcgaacattacatcgttcctcggcgttctaataacaacatcaatctgtgacttatgcgacgaaagactagcgctgacaccgaaaacaagtcagctcaaccaatttcaaacaaacaaacgaaacgagacgaaactcaccgctaggcgtccctgtcataataacacttcccttctgtaccctgcgcaagatacggatacgcgcagtcaagacaaaatatccgcaacatactcttctcgtctaatctccccatgcacactcgtcttcggcggtagcttactaggggcagatatctcgtcgcagtaacaagacacggtcccagcggcgcaaatatatcaaaccaacaattctataaaactgtaaaatggcatttattgacttcgtaagatcatctgcctgtcaacttaaacaagcagcagcagcagcagcagcaacatcatcataatctataaaacaactaaacaacagccatccacccacaatccccagatcaagccggtacatatggcttatcactcctaacaatataaacctccccagcgagaaccgcacacccaaccaccatcgaaatagcaataataggaagattcacacgggcaaattccaaactcccaacacggatatgcttcctcgccaaaatatcccgccacagcagcccagccagcgacgcactaaacgcagtactgaaagcaccataattgacaccgagagccatgctgtaaacggtagcccaccatgtgcgatcgctgatagggattccgctggcttcgtggatcttctgccatgcctggatgacgcgcgagaggaggatcgtggtgccgatatttgttccggcgaactggatgattagaagatgacgagttagcggaagaaaaagaggctaagtctattttctgttgtcccaatccttacattgcacagaatcacagataggaagcccattccaccgatactgccgattgtcccggtcttttcgacccagtggtcccagccgtacgcgaaaacaggcacccagcccttggtgacgagcgcctgtaccaggatgaacatcgtgaacgcgaagggtactagtgcgaatggcatgtgggagactacgactgtcgtcgtggggaatgtctcctgagaccatttgtagagatcggtagcgagtgataccaggctgcatggggcgctgtcttggtgatatggatatcctgggttctcctcgtatatcgttgattcggtggtttgtggcgagtccagtgtctgggtatatcccggtttcccattgtatatcgtcgagtcggtggtttgtcgcgagtccagtgcctggggagaacttgcacgagctagttgtttgctgtccatcacaacaccgcctggtagctgtagttctgggaacttttccttgtcaacgggcacagagactgacaagggcgttccgcattctggatcgaaatccttcgaggcgatatcactatcggtgctcttgagcgagatgtcgtagtctgtatgctcactgcggtggtgcaggcctgatgcatcatattgatccgcctggtccgatgtcaacgtccctggatccatcttttccggcagcgctatgcgttcgcgcatttctcgctctgtccgtgcttgctcaacctcccgtcgacccttcgcggaaatctcacgggtttcttggcgatggagccagccgaagacgagatcccagcagaacataacgaaagcagcgggtaatgtgacccagaaaacgggatgctctttgcctgatgcattgattgccaggagggtgataagcgtggtggccataatcaaccccccaaaagatgcacccttcctatctaagaatgggttcatgatctcttctagtgagagttgctttccctccttatcatcagcttcctctttctcctcggcggttcctctggcatgagggatgttgggattcacaggtgcttttttcttttggtcctcggacagctcgtgcattgtgatagagagaggaatgagggattcgtctgcgaaaatgatatatagcaggaacgggaacaggataatcgccgtgacgactacgggaacgatcatgttggccgtgtagacgatgaacttgatcttgaaagcgccggcaaggaccaggttggtggggttcgaggagacgagaatcgcagaggcgatgttggctacggcgaactggctgtggatccaggctcgggggtggacgatattgctggatacgcgggtcatgtatgcgaggaacgccgtgccggataggatgatcgggtcgtttccgatgaagctgcctagtccgaaaaagaaaaggaacaggtagaagaagagtcggtggccgaccttgcctgctttttggaggaccttgaaggccaggtatctgatgaggccggaggcgtcaatcgagatggcaatgtaggcgagtgtgaggaagaagaccatgatatcaatgggattgatgttgtctgcgccgactattccatcgtgtacctcttttcggccgattgccagaatcgcgagaaggaataggtccgctgttaaaggtgccgtgatgaagttcaatggaaagcagagtttcacgaaaatgggttgcttttgattgtatcgagggcgagtccggtgtggtattatgcgtatgacacttaataggtccagaatcccgtttgtgagccatcgaggcacgtatatagggatgtgaaatgggaaaaggacaattatatctgcatcgcaagaaacaaaagtaagtcttcgtctcacatcaggcctaaccagacttactagttataacaaaaataattagggtgatgattgatcgccaacttttgatttccgaagtatccagttcgtcgtccattttgaatgtttgcttctttttctgagattcacttcaagaatataatagctgtggtcgtgtcagcccctctatcgtacttccgccgtagtcaagtcatggtgacaaaataccagaatgcggaacaggagaaagttgcgtagcgagatccaatccttgcttttattgcagacgcatttctcttttgcaaaaagaaaatccgaaataacgcgacaaatatgacgatcttacttggttcctgttggagaaattttgtctgcgagttgctctccatccatatgcttgaatgcaagggaaaccaagaaattttcaaaatgcagagaaaccaagtgcactgcccctcataatcacatggacaagctcagatgattgtgacttgggccgcggagaggtgagcgccctgctaatgaagggctgaataataatatctctgtgctacgagtgggtttatggatggataaattaaggttatactagaagctgggcgagtttttttaatattgatatcataatgtgatagtgggatggacaggaaagaaacttccgccgggtctgaggacctgatgtctaagcctcaacgaaaagatcaatcaggaaatagtacgacatgcacgggacatagagaacattctgattagcttagattagctctgggcaaaagtgccaataacaagattcgaggctattggagactggcgaaactgggaaaccccgcactctgccactttgggaagttgtccgtgcgttgatgttagctttaacgttggccgacccatggttcggtcaatatcagacccagtcttttttgggggttctcgtgagttgaatcattcaatatttcctacttttcctacgttatcgctccagttgctcgtgaggacctcggtaaatgcataaatgcttacaacacaacacatacaccgcatgatatgtacgacaggccctaacgtgccaatcagcgggagctgatctcgccacatctcgtattccgcccgggtttttgcgcccgcccaagtcaatatcatggggcacttatcgtttcgagggttaggcattgatcataaaggttcttcctgggtctatccaatcccagctagatcgaggctccaaaccccgaaatgaggctgttgctgacgaaatagctgcatgctctgttggtcatggtcaatccacggagtagcgcttcgaggataagacggcctggagactccttgctttactttcctcttctttcttatgatatcccggcgagcttcattaagtcactgccagaaatagagaacaacacattaatatatgatttttttgctgctttatcccgaagttaccgttaccggaggcggataacatccaatgccagcaatcccaattgttacctccttcctagagcaagttctcgtgcatcgtgctactgcaccgccccctaacgtgacagtgtctgcaacttccgcatcactccaggtggtttgcgcctggccaatatcaggccaatatggaccggggacccgagtcctgtgggttttccgataatggtgttaccatgatatactaacatttactccagatactatgtcttgattgcagcctgcgtggtcgctcgcaaagtagaatggattcggaacgcttgtctagccgctgtgttgcttttccccgctatcgccgctcttcacgggattgtgcttgctgcacttcatgttgacggtgagtctaatgaaactttgccccgggtttcctcctggtgtgacccaatctgatactatataggcgctgtcgatatggatgtatatggagcattccagctatgcgcaattggaatcttaaccgccccagcgaccgtcaggctttcccggacctacttcaacaaccccggccgcaatatcatctttctatggacagtccttctcctggctgggctagtaagcttgattgtggaattcatgcgcctcaagcccactacttgcccggatgacgacccagcaagcattttctgggcctcaactgggggcaaaaagggcggtgtgtttaagtatgactctaactgtagccttgcttgtaccccggagaatgggccagtctcaccgttgcgacttgatgcagccaacaatatatacgtgattccagtcccccacgagctgacgttcaatgctactacgctaattgcggctgcatgctgcatccctgccatcctgtcgttaatatttatgtggatcaaaatcttggacgacaattgggagaagttctcaaatggaagacagaagcagaagccagatgatttcattctgggaaccaacggagctaccatcaaccacatgactgggatcaccgacaggataagcaaatggctatctctcatcgagataccggtgtttgctgcagcagtgctggcaatcctcgtcaaaggcgagatgaatttttggagtaagcaaatgaggtaccaaacagagcctatacaaagcattggtaagtggatgttgcacctcgcctggttttggcggttggaaataaacttactaaaagaaatcgttaggtcaatgggcgccaatcgttggtacagtactcgctgtattgggatcactatatatgctcctttctgcggatatggaagccgcgggacaagaagatgaccaacaagaagagattatcgttggaaaatccccaaactacgacagcactgtttcatacgccggaagcagttccgcgcaagattctagaacaattgccgagagacaggactcggatatcgaaatgacaactatacgccgccctactaccaatcaaaccaccaccactcaatcccagcacgacttaggaagacgaaaggtcgcccgcttctttaatgcagcaagcgccatcatgaccgccaaagcccacaatcaaatcaagaagacgggtttcaatcccgaagcaaaaacaaattaccccgagatcccaggagaaatatacagaaactcatatctccctgatcataaagcccattaccaaaggtcatctacacccgataaccgatcaagagctgaaagtttcacaagtcgcaggaactctgtggataatggcgaaggcagctctgggccccggagtacaacacgtcattctgtgcctgctccagctgtctcgcggccaagatcacgccaagctcactcaaattcgctcccgggtggggggttatttgagacatcgaccctgcagtgtcctccagccacacttggagggtggcagcgacaattgagtcccttcgatacaatgtcgatctcacgaagtagaacaccgtctatttccgaggtcagccccacaaattcatcgccgggacctcagttcctgccggagatagtagtttctgcccatgaaggtagttgattgttttgcatatggtgtactgatgctccggtactctaatggtgcgtggttatcttttctgttttattttcggaattctttatgatcccacgagttcattatgtctaggcttatacggtgtatattacagggtttcttcatacagcacattcatgataaagtgtcatcctctcatacctcaggcataatcacgtgataagcaatgtggtggagtggacccaccttcccctttaggaagtgtttgttcctatatatttcatagcaactccttcctcctaaccgacattccccccagtggctgagtgtgttgacacgcgtttaaaatgctaggttaggtactagctgtcagcgttcgacccacccagtgcacggtcataaatgttccaattacgctcccctaattggcccaccttgcttagtcgccggtcaggacctccagtaggtccggcaatgtgtgcgcaggtggggacgactagatcttagggtaaagatggttggggttacttaagcattatgatcccctaagtggcgacctgggagtataaccccaggcactggatgggaatgtcctttttttgccattttttcccctccttctacttttctctaaagtctgtctccaacaatttatgcctgcctttcctctcccccacaaagctcattgacgcttactacaggtatctatcatgagaacagagacaaggggaatacgcttggagggcaacattgtcaaaattagcgtcggtagttattactgtccagaattatatgtatcaactaccaaattatcagctataacccttcaaccctcaggctcctttctcccctcaagtctagcctgatgcgccatttttgagatcagagtcgccattccagcatgatggcagctggtgcgaggctccttttccggcaagatctcaccctcctgcccatcaagcttagagaagtccaaagactttggtttatcacagttatactgtgcattggcggcacgaagaaggcagatctcatttttcatgcagtcaccattgcagctctcaacttcgaatccgcgaacacgtctcgcccaataatcttggaaaaccgtgggatcgcgttccatcgcgacggtgacattgtgccagaaagctggactgatctcggcttgtggatccgtaagcggaggagagatcttggatccatagtctgccttcgcggagtaatagggcagccattctggctttgtctgaaaggacgggtcgctgatgttggcgatgtattgagtgtaatccaagacgccgaaagtgactggatcaatttcgtagacgcggaaagagggcgagccttccgttggcgttacggctggaatgatataacccattgcagtagctgtgttccagtctcggtcgttgtagtcggagtatgcgatctggaacccatcccggtgtgtatgaccatagaataatcccgcgatggtggcttcgtaacgctgcacaatttggtcgaagtaatccgaatggtcgcggaagtgatctggtataccggatggtatatgagagattagccatgcacgttggcccgcgtcctcggcagcctgcagttccttgatgagccattcaaattgtcctcgtgggtctttctccattggttcctggtacatatagaagttgaatacgtagtagaagatgctgttataagaaatgatgcgcagattgctgttgggatggacggctgagtacgacgcgaattgatccgcagatttgacagaagaaacacctgtgaggccataccaatcttctgcaagagccgagtacgcccatttgggatcagctttattcgaagcatccgtgggaaagaggttgagtggtgcagtgtcatgattccctattgcagcatacacagtgccaatgtccttttccattgcactgtacgtagcattgagcgctttcagagcttcggcctcgtcaaccaaccagatatcgcgggccaccacatcaccggtgtaaatggagaactccggattgatgtctgcgatagcagcatgcaagctctcctgaagtatttgtggtgcgtcacacttcgtatttccaaatggtccacatgggtaggctgtattctctggtgaatattcatccgaccaagatctgcaacagataggcttggaacacttgtagctagattcaggctcgtagaggaggtccacgtgtgtatcgctgaaatggacgaccttgagcggtgtcttgccgctaggtggtggcctcacagtctttggcttgggtgaagggaacgtcaaattataggaatgaacatcgggttgcttgcagagcccgaccagactagcgcatagtgtctttgaggcgtcagagttcagttgtaaatctttgaaaacatcatgcagcgcagggccttctttcttgatgatcccggcgcagacatctgggtcctcgacctgtgcacttgcgattaatgggattgagtcagtaagctcacgagcatggccaacataccctgctgattttgcacaaccctgtgaatacgtcgatcatgaaattctcaccaagccctgcggcaactttgatgctgccgaggagaatctgtataattgcatagagtcagcaaaggagtcaatagaatggaagtgctaaacataagcatacttggcaagcaccgcagtcaactgtattcttgaagtcgtcccagatagaagcgacggactggtcgacttgagtctcggcttgtacgccccggagagacgccgaaaggccgaacgccagcagcaagaagttgagtctcatcttgacgaggagttggctagacgaaacggctgattggatgaagacaaacctcgaaagcagtcagggcacttcgtaccttcccagcattgatgtgaaactcctaggcagtcggcatcttaaatatcacgggccaagagcagctgggcaggcccttccgtactttgccaaatagaaggtgatcctacagctgcttgcttagattttattcggttcagacataaccttaggacaactttttatcatgtgatgagcagtagagtagtattcatatcccctccaggtcataaaaatagaccacggtctttttgtggcctagtggtaatacgctgtattatttcgagaaacgcagccaaggagctagcagatagtcccttgtaacgttgcgaagccgctgatctcaggggctgattatcatacgccattggggtatccttggcatgttcgcatactcgtgaacttgctcctaaataggagtcgcggtgttcaaacgaaaatttagtaccaaaatatagatgaacaaccagaagcttatctaaatgtagatatgcacaccaagttcatacggtaaaatccgatcgaatgcaccagtccaaccattgtacacgtcaggctcagcacttgcaggattcttagtaaataaattcttgaaatcttatgggtaggaggattggttcgaacggatacttgcaggtgttgatctggggtagaaaatcaatatccgggctcgggtctgctgcttgggcgtattaggaaggagcttcaacttttggcctgatgcatcacactaataattggcgaatagacagatcgctgtcgatcgcaaatccccaacccgtctgtctcacaacagaacttcctctgctgaatcccccagcgcgcagcctcgcagactcggccagattcaataaaatgactgccacgtgtatttcaagaactttgtgactccggaatgtggaatggctcatgtgcaggaaccataaattgcttatataggcgcggaccagcacagcccctgacagaatactcgcgcaggtatccatgcgaaaaaaatcatagtatcgtgtcagtctcacgggactctcgaatgggttgagtaagatattgttggttggttggatttcgtcatggattggggtcagctcgctttggtctgttgtgccatgttcattggatgagccagccatatgtggggattttcattaagaaacaatccctggacaagaatagtatttgcatgctgtgtatctgtgtatttgtgtagcattatagcctcatagatgtaccttgaaaataaaaagggacaaggagagaagtccaaggtgattggcgggccaaagccggggtaaaaggatctaattttctctctccccacattctttttgacgtgttgaccatcttttccttcaacccccttttcctttctatctcaacatctgtccaagtattttaatctctgttgttctccttcttctccccccgtcctccatattccggattcggactccgtcgggaaacgagacgatgacgcctccgtacacgcgccatttcagcacgcttacgatcacgatcttacaataaaatccgagagcttcaaccgtctgcactgttctgcgctacgtgtgattgttaaaaccggactgtccgttggggcagtccgccatcggccaaattcgtcatggagggtcgtcaacaagccacgctgggtgtttcgatcacccttttctccatcgccagtctatttgtcgcccttcgcttcatttcgcgtatatttgtggtcagaaagattgggttacacgactggttgatgttggtcgcatgggtaggatccctaggcttgatccctgcatgtacccggggatgtagcgagaatgcgctctattgggcacatgatcgaacctcgtgctggagctcggaggctaaccagtctgcagttcatcgattttggcttttccttctcgctattctacgccgttcggaagggtcttggtctccattcgagtgacattaagcctgaagatgaactcgcttttaatacggctaattatgcatttacggtcctctatgtgagttacaatgccattgttacttcccctgttaccccgcaggccaatactgaaataaatggcatgctgacgatatttcagaatcctgcgctaatggcggtcaagacgtcgatcctcgtcttcttcctgaccttgacacgcaatcaaaaagtattccgatgtgcaaactatgtcactctatttgtagtgaacgcagcgggctttgctttaacattggtcaatgtttttcaatgtcgtcctctcagcgcagtattcctttctgacatcccggcccatgcgagttgcaccgatattgtcaccctgtacctttcctcgtccccggtgaatattattacggatctcgcgatcctgttgcttccgatgccgcttttgacaacaatgcgcctaccttacaagcaaaagattattttggtggtcactttctcctttggtttctttgtggccgtggtcgatgtggttcgaattgcctttctccaacaggctgccatttctcgttcgctggaagtcaagtcaattcatatccaaaacatcgggggggttgatttcagttgtacgactcgctcatctccgtattccaaattaacgcgtcaattgggctaacgatgggatttcacagggtacgcgtcgctatctttcatgtggtctgtcgtcgaagtcaacatctcgataatctgcggttgtgtcccgagtctcaaacctctggtcactcgtcttgttccgaaattgattagagacactggtgacgagacatcaactgcttcgcctcatggactctctgcaggcccgacaggagaaagtcaggttgcagtgccacccccggctgcagtctcgggttcgccagaatttcaattgccattgccatttccatcgaataacaacggggataagggtctacggaaccaagttggtggtgtctccactgggcgacctagctcccgggactcggagcctatgggtataatggatttcctaggtatcccagaaacaggggccctcgatacagagggaggcaccaacacgagcgcatcttatgcaccggatatcacattcttcgattttgtcaacatgaagaatccggaaagtatgctaaagctgaacaacagagagtcgattacgccaattgcattgaccacactactattcttcctttggggtttcgcatacggcttgcttgatattctgaattctcaattcgagactatcgtcaatttaggtccttggcattccttgggtcttcatggcgcgtacttcggcggatacgtggttggccctctattggttggccgaccggtcttgaaaatatggggcttcaagtccacgttcatcactggactttgcatctatgcctgtggaaccctcatattttggccttccgctgttctgacgtcgacacctgcgttcattttgtcaaacttcattgtcgggtttggactagcagttttggagactgcggcaaacccgttcattgcgctatgcggaccactcgagaattccgagatcagactcaacatttcgcagggtgtgcaagctattggaagcgtattatcgccgctcctagcgaaacgtgttctcttcaagaatgttcaggatgtcgcatccttggttgacgtacaatgggcatatcttggcattgctctgttcgatgtgctgctggcagtggcgttctattatctaccaatccccgaagcgtcagatgaagatttggaagaactagcaaatcgacgccgagaagacaatatgaccaaagtcatcggtattccggtcgtttggctgaccctcggcctgggagtctggtctcaattcttctacgtggctggacaagaagtcgttgcgacagctctccaacgttttgttcttgccgctcgtccagattcatcactcaaaccattcgatttcctgactattggacacagcattttcgccgtgggccgcttcttcgccgcgtttgcgcaatggttcctcaaaccacgctggattcttatggtcagctacatcggcatgatcgtctgctcaattctttgcatgaaaacaagtggcacgggggcaatcgtcatggtaatgctagtctacctattcgagagcggtgcattcagcattatctttgccatttccctccgcggcacagcccagcatacgaaaacagccgcagtcttcatgacagcggcaattggcggcggcacctttttcccgtttgccgagtacgcggcatacctcgcacacggcgggtcatactccttctgcgttatagtcgcgctcttctgcgccggtgccatcttccccatctacctcaacctcgtacccgccgtgaaaaagcaagtcgacccggttccgaacgagtatctccgccgacatcgccgccgacctcggacctcgatcgagaccgtgcatcgcgaaaagagcaatccttctcttggtggtgttctttcccatccgcgcagtctggcatcgaatccagaccacctaccggatcttctgcttccggaggagatgcacgaaaactcgcttgctcgcgatttttcaggggctaaatctagttttagctctacctcgcgtgccaagtcgaattcctctcgcaattctggttcaaagaaaaagttctctaccagaattgatgatttatgactgtcgctcaatatgcctaactgctgtttttgtctctttccttataccctaaacttcacgatacttgcgaacccctagataccctttcgcttttgctttttgggttttgtcacaatattatgtcatgtgtcttctctgtgcatatattgggcggcaatcctttttgctttttcgcagcatttcagcgatggtgttttgaccaaaagttattccttctctcttagcttatctggtttcattgcttaatgatattcgaagaatctcatgatcaaacttgacttctggctgggatcaattgcatatacctaatttggatctgattggttctcgaccatgagggttctcgtatggcccaccctatcaagatgtcgtgacccttgccaatcacccgcgggcaattgcagctcaggcagcactacctaccaagtctcgttccagccccttttgcaacctcattttagctttcgcctcaagtcggttcggggttgacccatctacggattttagatgtagtccacaaccttcgaattaaagaaatatttacaagtcgatacattctatatatttacacgtagcatcttaagctgcacgtagccgggcgtgttaaccaaaaaagggctgttttgggaacttgctcattaagcactagcatgaaaataggtagttctagatttattggctatgtactatatgaatctcctcgtacccataatgacatatatcattcttcaaccgagcgcagattccgtttagatgcaaagcagctgatacattgtttgctattcctatgcagcttggcagacggcaatctctttatccgccctgcagaaacgcggctcggcaaatctctctttgctcatcttgcggaagatgcttctctagaggatgtctatgtgtctttgtccacgaagctacatagagagctttatggcaatagctagatcatcattttccatccacttcatatcgtcatcattctggttgactattttgcttctcgtggtctttacctccatcgtcatcatatctgtgtgatgatctagctactgtcacaaagctctctatatagctctatgctataaaccaccaaattccatcctccagaaaccagaagaagcacctctatggcatttctttcacttgcggttgatcacttcttctctcgtagtctgcgccttgatcagattcccaatcctttctatgtaattttgcgtgggtcaagggtttatcttggagagtgcctttttagacggtttcatggtcaaaatatgtacctcactagtaattttaggtagtctgacaatgatgatttactgaaggtagcccatgaatgctactcacactgtcttctttggatcgccacagatctccaaatcgcgaactaggtcgagggtggaaataccagaggaatgtcaatcccggcattccccatactatttccctccttccctaacaattatttaattccccaacaaagaacaaggccaggctagaatacaggatagtacactcaaactgaaaccatgaccaaaaatcagagcctccgatgcaacaccgaaaaaggtgtgatctcggagatttaccttttgatagaagccagtcagattggattccggcggtggcaaggctagtggagcaagcgtcgaactaaaaagcctataagaaggttaaaagcctaggcacgccccagtctcagctacgccacgagatagttcacaaagcctcatctattagagctaataaagcgatgtgcctggagtaactacaatataagtaaatttctcgataaagtttcggagtagattaagttatgcttgcgatgctctatagatatcacgatcggttcttatatagtcagtccctaccgccgttaagattaggcctacgattaggcgtaagagctaatctggtccaaaactcaaagatgctctgaaagatacatgtaacaatcaagacacggacttattgcccgattcttccatgatattcagatcgagcgaaaaaaaagtcgcccccctcaaacgcgcacagccatccaacgggcagccaccagcggttgccgttcggattggatctggagagtccacagcggaacaagcgcaaaccagtggggttgcgagattcagcgatttttgaaacggcgattctgttcgtttggtacgattcccgacggggtttcttttttttttttggctgcactgggattggttgatttatacagaccgaaatgtagcctattctctattatactaaaccggacaggtgggatcggctttaagtttgaattccttttttttttctccacgtcgaaggcgcaatcgccccaatgtctggctctctgtatctcaactccgggatcattccggagcctcgggtgacttccgttgttctacagaccttgttggagagtgttgattctagttttcatatggattatatgtatagatgaattacgtatatatccatctacctatgcgatctagtaaaaccgaataggacaaagaaagctcccccccaatgatgaaactcgtaacacaagtcgcccgttactaaatgcgtattttgcgcagaagccagcacccatatcctaatgtacaggaacccgtattaataagaagaacccgctggacagaacaaatgaaataaacaagaaacaagatcgctagagatgaaaaaccaggagccagacagggctctggtggacgccaagtcgctgacccaatgtaaaaagacaagagtcgaaacaagaacagtcaacagtgctcgatgaacctcagctgcgcgcactccgcggcagtgagttctgcgaggacgagtcgtgcatgatatccggcgcccggggaccaaccatccagtcttccatagcgagccattcactccagctgcgctcggcggcctcgatctcggcgtccagggccccctgcaacggacgcaggaacggtatggtctccagcggggggatgtcgtagtcctttttcacggaggcccagccgccgctcttggctgcgaagaggtagttgcggcgctcttgctcgtgcatgggtcccacgccgctgccccagtcgtcgccgaagaagccgtgcagcacgccggggaagtccatgccggttgcgactaggcggcggatgtaagggatcaatgagatggggggtggccctgagggttgtgtgccgggtggggagggttggttggaaggggtcgaggttgagttgaagattgggtgaggttggcgctggaaggggagtcggatgtttaagaatgtggagagggcctggacgggggcgctgtgctgggcgtgatctaggaagtagcgttgacagctttgatagcggggataccattcaaagatatcggagttgtcgtctgaccctggcgaggcgtcggctaaaccaatcacaggggccgggtcaatttgtggatgggagctcatagatgggtgtggtgaaggtgagtccgaataggatgttgaggtcgaggtcgaggttgcagttggagctggagttgcagtttgtagtcctggaggatctacttgtctattccttttcccgatgctttgcttagttcgtgttctctctcttcttggtctgtttggggctgcgcctctttcccgaggtctgggaatccagtggggtcgaattgcggccccaagttgaaggaaccggaggggtaggtgggtgaaagatagattggggaatgattacttggaaaaaatatccctacctcgacgaactaggagagagactcgacgtcgtgaaggggaggttggggagggcggtgcagagcggaacagatccctgatggtcccgagtccgccacgagattggggcttgttgatggacatctgttagggaaccatctaggatgttcaggtgaggattgggggatgttcacggaatacccattggggatattatgtatgaagcaaaagaaccggagacatacatgtgaattccaatacctcaagaggcagagggagggaagtagaagaggaaccagacgggagaactgaagtaaattcagagagaaaaaaagatatcagaattgttctggaacgtccatagaagagaaacggggtctgtaggactaataagagacgcactcaacctctatacggagtatttctgaatcggatccatcgaggacgggtctatccggtcaggccaatcattctgagatctgcttaaccacgggtcgacggtggatatcgatctagggcaggttttgggaatttttatttgatatattaatatattacgcttatattacacctttaccacatacattcccgatacggaaggctctcaatcctggataactccctattttgtcacagatatcaattactttgcacgtctggcacgtcctattggcccggatccgggcatgctaataatacctgttcctataaaaggcgtccgggtacatgacatagctgcatcgaagcgtaactagatcaggctggatcagaaagggaaaaaaagggggccccttcaagaccgggacctcctggtatgtgctcaaccaatctcaacccgggctggtactcgctgcaaggcgcctagtcatgattgaaataatattagaccagagaacgcctgcctattccatgtcagcattgcctcagtattaagtggacgactagtcagagcatagcgttaaatagattgaaccctgcagggtagttcgtttcggtatcacttgacgcaataattgaatcaagaatcacactaagagtgacgttttgatagtgggtttcatatctaaatcaaacacagggagttgatctgtataccatgtacccctcctccctgccaagttcccacaaaccgggttcttcaacatcgcatgcagcacgcaagacccggaatccactttgttgttatcgaccccgatcttcgatccgggaacattccttattctgattgtatgcattgcaaggctacggagtacttcttccacctcaatccccatttgttcaggggccgcaatatgacacaagcttgcaaagtcagccccatattggcgtcactagagcacacgcgctaggatctacttaaaaaagggccagaacataggagagcaggggccactcatcgagctgtgagagtcagatccccctttagcggggaggtcaagctctgacccgatcgcgcctcccagataagaaatgacagagctgatctttaggggggttgaccatcccgtacggaatacggagcactccgtatggagtacggcgacctgctttatattgtctactgattaagaattcaaatcgcagtttgtgtgcgggcgagtttttgtaactccttttctggagtcgatatgggtcccttcagctgcacaaaatctggtggcgccgggccaggggttaagtaaagggcggaactatgtgcgtcgcattccccttttgcgctttctttttcgagattatactgtcggctatttcgattgggtcgagtttaatgtattcatcactgaccaattctaatattgtgaattctagccatccgatcaatctattctcactcacttccccgtggaattcgccacatgcggagctccaatctgatccactcgtttgccatttgacaggtgacggggcgattctttacaatatatgacatgtgtctctattgagctaggactgcagttcgagtcagccagtcggaatcacgaactggcaagaagtgtgatcacaaatcacagcctgagatgctcttgccaattcgatcatagtgcgcacgctgcacggtctcgccgatgtttatgcgaatatgcgaagaccacaatattctccaagacggtagtttggtatacccgctagtgatgacaacctattgccattcttgcggagcggagccaacccagaacagtgacacaactcggccgacgccattgagctgctagaggctatagcctgtctcaactcaagcgcgacgacaactagtacgcacgcagtatccacgctcagttccgcggatacccctgtaaaggttgcggagcgggtagatagattaaggggaatctcaagctgctgcccaatcaccacactaccataccctatgccaatggtataaagcatttgaaacaagccggtctgcatggatatgtgtcgttccaagacagagacagcatggtcgcatgaccaagccctctgcactgcagctagtgggtattcggataaagctccgcagcgagttggcgaccgggcttcgttgccaagagtgtacgagtactccatacagacagggttcccgccgaccgccctatgtactcgttatgtcagaagcgtcgaattatgccggtggtaagtaggtgtcacaacatcgcaacttgccacgcgcgatcagtgcatccttcgcacatgtgtcgtggcgaagaacatgtaccacaccaatcccaagatgggagaaaacggtgaacgttggacttgcaccccttcgcgacaagatcgccggcgtttatatatccatgcagggtcgaaaacggtatatcaacccacacccggcagccgacacgtgtcaccgcacatctctagcagatcaacatccccgacacgaataggaaaaacaatacttaaccagcaaacagcgcgaagatcatcgcattatctgatccatctcctctagttacctggccatccatgtccacttcgtacatgacatgacatgccgtgtaactcgtatccctctacgactttgcaatgctgcaagtgagcgatgaggatttctatagaccgtaactcaagttcttctaagttcgtgctagacatggataaccccaagccctccacaaacagggcttcgtaaatcctcgcttcaaaactccgtactccgtactccgctactttctttgtatgtaccccgcgaatagcgcgacagtggcgatctctaacccactcggccggcagaaacgaacgcagggccccagctgacgatctcgggtaaaccgtgtgtcatgggcgcacggtgtctccgatagggaaatattggacgaatgggaaatttgctactgtcatggactcgtgctggtgtgcgggatcgcttgttgcggagaacgccgttttcctggtctgggctagtctgggctgatctggggaaatgaaatgcatagttgatactcgtatactatccatagataacgtagatgtgcatatttttgaatggagtaggtgtgttgatgatgactgggatgggtctgatgggcttggatatcgtggtgtcgatgagttaagttagtgtcatgttagcgtggaagtgaggctcgtgttatttccacgtggcttggttgaaacgctgatgggtctgtactccgtatatagatcggtgttgaagcgctaggttggactatctttatacacactgtcccataaatatgtggttgttaactaaacccatgggtgaatttccggagatatatcctatggttattgtctgtttgaacggtaaatatatggtggaccatgctttggggtgtgcattgaccagatgaattcagccctggagattaatcatgttcatagcggagaatactttacgttgtacggagtatgtacatcattgaatagatattcaatatcagtcaagacaactttggaagcacagattcccattcgtcagatatcacgtcatggcaagtccggagcacaaggacgtccaattatagaatatttatgtcaaaaatccaagaatctctacaatagcaagcggcataagtgaaacatggagacgctagacaagctaagagatctacccgacgaactaaatgacccaacggtctccacgttgcaaccctctgcaagcacgttgtcgaacccacaagatccaacatccgaatctgcaagataagaacgcatatgcagacgctaagtaacgggaacagtccacagtcaaccctaagactagagagctctaacggagataagcttctggatctgcaacggaaatccactgggtcctgagggtcccaaggttgtcccacgggccacatgtggtcatgtgcgagtatgaattggaggtcgaccgaggcgaactctcgtgcgagtacggagtagttatagatcagatcaaaccacagggacctcgggagtaaaaaagacggagcatcccgtgtgagtgattctacatttggcttctcggtgaggattcctgtcgcaaccccaggaagcaacacgcagcctccgcaaatcgctatcaacaaggagtggagaggcgcgtctgagttttggcggagagctgtagcgggcacccgttcgattggtggaccgtggcatgatctaggatctagcaatgtgtaaaggatcaggatgttggcatttgtttcttcctttctatttattttatatttatttgcatcgtatgatcgttatcctcgtactctgtagaggcagtcgaatcctgcaatatatttccttaagattaggataatctagagctgatattaaaggtactccgaagtacgtccacggcagcgccgaccatcggggctccaatgcggttaaccgggtcttggcatcacacgggattggtgcctgacccacgggggaaaggacaaaccctggacagtccgagatgactattcgggggcgattgactggaccgggatttggtgcgggtattcgatattccatggatttggctactctgtgtatgtatgaatatgagcattctatatgttgtagcaacttttttgatctcattccgactagatttaggtctggaattacccctccacccctccatccctctacccctctacccctcagttcaactgatccagtggggcaaaggacgagccgtagggtgtagataaaggaaaaatgagtaaaaagtgttagaaagcaaagacgatcagataagctcggtaagctaaaagtggcaggccccgttttggggggccgctttgggtatagtggacacgtgacccagcctgcagccgagtgaaattgccgagttgagtggcggagacgagttttatttttttatttcttttattttacttttatttacttcattttcgattcaatccatagccatagggatattcatatgaggatagctcgaagatagctcgaagatactatgttggacttcctagtaactacgaaatgcacagtccacgcatgcattagaggttcagcctcctcacaaggttacattcacttcaattatattttttcacctctcggatcggtcctctccgagaatacggatcgcggaagagatattcacagacaaggaagatttaggaagaaaccacgggctatgattgatgggaagattcgaggtagtccaatgtgggcaagataagccaaattctgtgcaaattctgtgaccttaaaccataagataacattgttcgggccccgaacttcggacgtgcttcccacggaaaccactggaaaccattgggtttcatctttcgcttgggatcttctccttccaattcgtgcaacctggtcttctggcatggtcgtcgactgtaggctcatcgaccaactcccgtcccttttccccccatcgtccggaatctgtcgtccgactccggcttggagtctggctctccacatttctatatatttgtacaatcatccccttccctccttcttcctccatctactctccaaaatctcgattgtcttatactctgctcgtgggcaatttctaatatcataatcacatcagatcactgcctagcattgatctaccctacctaaaagcagagtaaccgagactaaaaacccgccgaaatgatccagaacctccccttcgagcctgagttcgagcaggcctacaagggtatgtctcttccctttcccttgtccacgccaatgccatatcacaatttttgcccggcttaattcctttaccgtcggcatcttcccggcgtgcggctccacaatttcggggtgactcagctaacattcccgaaacagagctcgcctccaccctcgagaactccactcttttcgagaagaagcccgagtaccgcaaggctctccaggtcgtctccgtccccgagcgcattatccagttccgcgttgtctgggaggatgatcaaggccaggtaagattcttgtcaaaagatattcgatcaattgccacattctaaccccccctccttcaggtccaaatcaaccgcggataccgtgtccagttcaactccgctctcggtccctacaagggtggcctccgcttccaccccaccgtgaacctttccatcctcaagttcctcggtttcgagcagatcttcaagaatgccctgaccggcctgaacatgggtggtggcaagggtggatccgacttcgaccccaagggcaagagcgacagcgagatccgccgcttctgtgtctccttcatgaccgagctgtgcaagcacatcggtgccgacaccgacgttcccgccggtgatatcggtgtcaccggccgcgaggttggcttcatgttcggccagtacaagaagatccgcaaccagtgggagggtgttctcaccggcaagggcggcagctggggtggttccctcatccgtcccgaggctaccggctacggtctcgtctactacgtcgaccacatgatcaagtacgcctccggtggtaaggagtccttcgccggcaagcgcgttgccgtctccggctccggaaacgtcgcccagtacgccgccctcaaggtcatcgagctcggcggttccgtcgtctccctctccgactcccagggtgccctcatcctcaacggtgaggagggctccttcaccgtcgaggagatcaacgccattgccgccatcaaggtcgagcgcaagcagatctccgagctcgccaccgtggccaccttcagctccaagttcaagtacattcccggtgcccgtccctggaccaacatcaccggccgcattgatgtcgctctcccctccgccacccagaacgaggtctccggcgacgaggccaaggctctcatcgccgctggctgcaagttcatcgccgagggctccaacatgggctccacccaggatgccatcgatgtcttcgaggcccaccgcactgccaaccccggcgctgctgccatctggtacgctcccggtaaggccgccaacgccggtggtgtcgccgtgtctggtctcgagatggcccagaactccgcccgcgtcaactggtcccgcgaggaggtcgactcccgtcttcagaagatcatggaggattgcttcaacaacggccttgctactgctaaggagtatgtcacccccaccgagggcgtgcttccttccctcgtggctggctccaacattgctggtttcaccaaggttgctgaggccatgaaggagcacggtgactggtggtagatcagtcgccctcccgtttattctgggcggtgttctgtgatgatttctgtcctctcttgaggagaggcagcttcgatgcattttattcttttctttcaaaatagctttttaccctttatgtcaagcgggttatggatagaggcgcttggtttttcccctgttgcatttgattgatatccccacttgagcaccgctgtttgttttggttctgcacttgggattgtcatgatgataacgagattcaatgaatgattcaaaaatacctgtgccctgtaaactgtagatcaaagtagagccctacggttgcatgaaactttcaatccttcaatcccatgaaaccctagagaaatctatagatccaaatcaggtgttaatctgtcatgtccaacgcttaggccccgaccagtgctgcagcacttgccannnnnnnnnnnnnnnnnnnnnnnnnnnnnnnnnnnnnnnnnnnnnnnnnnnnnnnnnnnnnnnnnnnnnnnnnnnnnnnnnnnnnnnnnnnnnnnnnnnnnnnnnnnnnnnnnnnnnnnnnnnnnnnnnnnnnnnnnnnnnnnnnnnnnnnnnnnnnnnnnnnnnnnnnnnnnnnnnnnnnnnnnnnnnnnnnnnnnnnnnnnnnnnnnnnnnnnnnnnnnnnnnnnnnnnnnnggccctaccaatgctgtctcagaacatgtggctatcaaaatgtggcttgcacccacaagatacaagtcacgtgatgatggatatgctttgtcacgcggtgattacgtaataccttcacgagcctcggagccccgaccaaagaaagagctatccctcccagcctcaaaacccgtgacctattcctctaaagaaaaatgactagcgcgagtctgtaacttgcaattcctatttctacaacatccgcggcgcagtgttatgttgtggagatgacaatgctgtcggacagggcaatccccgaacaatggaggaccttcctccaccaatgtttggcgaaccgtatagatatagacgagttcacggacttgtccgggctgatgtttgcccgcgcaccggttaaggaaaacgagctccttgatctgctccttgaagctcgcgcttcttccagtgttacctgggaccctcttttgccattgtacgtcgatggactgtgcaagattgggagggttaggtcttcgtctgcgctgacgagtttgctgaagcattcttctgttatggatgcgttggggactggtgatggcgatggtgaggagggacagggacacggctctccgtccaaggctaagaagcacaaaccgtccacgctcatgactgatatcaaagtcattcaggatgtcatggtgttcatatccaccgggtcaatcccgaaaactgtcatcgaagctgcggatatatactcggctaccgtagactggattctggccgtcgtggcgtggcacaatcacagctctgactctgagcacgcgacgggtggcttgatggggtcgcctgatgcggtctcgttgtttgagtcgctggggattctgcttgccgctctgtcggggactggtaaagggctggaggtgttgtccagtgattacaatcaaggtatgtatatgtggtttccgtgtttgttacacgttattaacgatatcctctagaattgaaggcgaagctaggacaggctttgtcaagctacttgcctctctgtatcgatgtctctctgccgctgaggcatcgtttggaggggttgcagaaagtgtttcatctttaccccggtcaaccttctaaggctttgggtgggcctgctattgacggtgttaatgtcaatgccctccagtttgagtcttccgtcatggatggccccgttattaacactagagctgggctctatgtgtacatcaactcgatggtacgattatcttacgctacgatgttggttcatggctgactagtaacaggtcgtgggacgtcctttggtcgatgacactattctgatcaactacctcaccaatcgataccaggtaagtccaattgacacgatttctagtcagagttgtttacaacatttgattaacccttaccagggccacaatgacgttctcatcgaggaaatcatcacagccgcctttgatgttctctccaacggcgtgtatcgtaacgaatctggccgcacgatgctcttattccggtctttccttgtcaacaagctccccgccttttttgcagccatctcggcagcatccatggtgccgatctccatggaaatgtgtatcagccacgccttaagccgtctggatccgaacgcattcccctccttctctcagatgttctccatgcagggcagcagtgttttatcagatgctcgccaggagttcctcttcgcttgtgcgtcgcacaagctcatacgagaatccagcattgaacagcttctcggagaaaatcccatgcagacactgcctggtggcggcccttatgtcaaggatgatctcgtttcgcaaatcaataacaatcatgaacgtgctgagcaacttattggtgagatcgagtcgatggagggtaatgcaggcgcgatagttggcgctgtggtcgatgtatgttcgatccgatatcaattcctgggagtatcaacatgctaacttcttcaaggtcatgcaaaatttgtgtcatcaaaaagagacaatgacgctcaagaatatctgcaattcgctctcacgccgcccgcagactttggacgtcatgttgcttttccgcactacaaagcaagtattgcaacctctttgcgctgtccttgattcctggaagtgggacgaggaccaaggcgaaaatcagcctgtctatgatgaatttggcagtatcttgttgctcgttcttgcgttcaaataccgatatgatctgagccctactgatatgggtatctcgaacaatgactcgttcttgttgaaactcttggaccggggcgcttgcagccagaagctgagcgacttgagcgagaagcaaaacaaagatctcggcgcttggatcggagctctgttcattgccgagggcatcagtgaagagaccatgtcctcttgcagcccacacgaattctacatgcttgtgacgacattgttcgatcagagtcttggggcgtgcgagtccggaaagctagatttcgacactctgaaaggcggatttgaatgtaagaaaatcttcacgcgatcgcttccactggatacttagctaaccgccataaagatctgctcgagcccttcctcctcccgtccctagtcgtcgcattgacatggctgggcaatcacatctgggaatcagagaccgaccccacaatccccatcaaaaccctccactccctcgttaaacccaactcaatctccggcgaagcccaagctatccaccaaacagtcctgaacataaccggctgtccactagaagagcaactaaaaaatgtccgaacgagaaaccagtcgcggacagacatcaaaccaatcctcgatgccctggagccatacatctccttccgccgcgtcggcagctgtcgccgctccgaacttgacacctggacgtcccactccgcgggcgggctaatagccagcatccgcacaactttacaagctctcgtcctctggagcgccaacccaggaatcagcatggccccacacgcatacacgcaccggcaggtgctagcagggattcgtatgctgggcgcaacacgtgtgctaggcgcgataatcgacgaagtcaagcagcagagcgaagcaggtaacggacatatcgcgctagacattgcgacgacgatggtgtgcgctccgatgacggagtccttcgccgtcgaccaaaacaactaccacccagtcgacccaagcaaggaggctttaccacggtgcgcgatcctgacgctgcgcgacgccttgtcactacagcacgagaacgtgcccaagatctccgagagtgatccgctacgcgccgaggtcgtggtgcgacttgcgcgacgggttaatatgctcatggcgccgccgtcgcaggtctcgaacatcgacgtctcgaatattattcagaatatgcatcttggtgttgaggggcatgaggatcggatggatcttgagccttccgctgctggtgtttcgggtgatacggtcaatgaggatgatccggataatatcaatcagatgctggataaggcggcggcggatgcggcggctgctgggatggatgggggtggtattggtgtaggtcaggatatgggacttgatcatggggctggcatggatgctattgacgatgtgcttaatgcggcggatatggcggttggcaatcctgagttccttgacttggatatggaagacatgttttagtcgggatggttttatctttggtacataatctatggacttacaatgtccaatctttgcatggcattttgttcgatctatgttttggcgaatgatgattcattggacaacgaaaaataacaattatatcttcttaccggaagaaacagaagaagagaaataaaactcgtattgaccatcaaaaactatcaacagagcactagggaaaagaagaagaggacctcaggaccaaagtacccaactacggccctatcagactgagtcacatgactatggatttccctgcaggactaattctctccaccaatcaccatctctcctagaagaccccagtcttgttctttttttggcagtttttcaattccttcattttgaacacctctgaaatattagaaatggatataagatggaaccagcgtaaggaacatcatgccagactcgctgcacaacccacaagagaaaaaaaaataaacaaaataaaacaccatcaaccccatcgccccataactagcaattcgatcctatactccgcacccaataataatacaccatctagctgcgcctcgatacatcgtcgacataggacctatgactcactcaatcctagaaaccggagtatgtctcagtagccgacgtcgtagttaccacgatgcaaaagcaaaagccatgtacgtacaaatattgaaagtcttctcaactttcccggccagctggggaatccccgagccagggaaaagtttctccacagcttgcatgggggtcgggaggaggcctcgtcggttattatttctaataggattgagtgggactgggcctgctgctgccagagccgagatggagatggtggcgaatattgtagtgagtttcatgttgagctgtcttcttgaattgctgtggaactgaggtggaattgctggtcgttgactccaaggtggaaatatatatatcctgtgtgttagtggtcaagtctacgtaactagtcaatatgctgttgtaggtaataacaaggtatctgtctaaagggtcacttactatttcctgactaggtgactgtagtagtagtggagtgcttgatactcttggattggattagcagaagagagagtacccctttccaatgaccaataatgcctggcacggccttcttatctacatccccgagtttcgtgctttgtgcctgataggccttcttatctgccatcctgggtctggggctaggaccctcatgtcggggaacttcaggcatgggtctagctcattccgatggcttgaaggcactcatgggaagaaggttttccttcggcgtggggaatttgagggaatgtacgcgacggacgtgtctagacttacggatggtgttgagggttgtacagggttgtacatttgatccgctacttgacatctgcagggttgttgcaattatcagattgatacacgcaattattgaatgaagatcgcgcaattactgtatgagacatattctgatcatgctagaatgcacctcttatctccatgcataagattagttacacccctgtcaaagattctttagtgagatgctgttcagtcaagggatacaatccagcccttgaatacacatcgctactagaagttagttccttttctgaccatagggaagctgaatgaacagattgtgaacattcgttgctgtcgtcttgaggatatttatatgtaaataagtatgggcccaagtgaatacatctgagtctgactttcgataattcttccaccccacctgccacaacccacctgagccaagagcagcctgttgatccagtgctccgtatggctccggtactccgtacaatgtgagactagctctcaaggtagccccgtcgtccgaccccgctgctcattgaataatctgatctttagtgctcatctttgtacggagtactccgtacggggaagaagtacttctacactggaagcgctgtcgtgtccaagctcacagtctttgggagtagattgtatattggatggcactcaggagcatgtctttgatgtggttgagacccccagcagccccaaggcatgcatgacgtgatattcccggaagaatatataagaatacccggtttaataccgatgcgtcaattaatctgcctagcaagaacaaattcccccccttactacgggcctcgttaattcaccattcttcccatacaaaagtcgtcataacggagccgagccagttccggccaatggaagtgacttgccgatcaatctccacttgttcaagcacggatcacctttcaaaatgtcggtctccgagagtagcggcgagtcctgctatttcccagagtggaaattactcatttggaactttggtggggatacaagagactgctgtaggtaaacaaggtataggcaaaaagcagagcactattagaacgcttcttgcggtgtaaattcgtatataaaccaactacatttatacatgatgtgtggggggcctggacctacgaacccctggaagtaaaaatcatttcactgcgtatcaattgattcgttagagtttggtctagaggtggggggttacatagacgcggccagtgctaataactgaacgaaatgtcagaaccgttggacctcttcattcaacacgcaagatgttgcgcagacccgcaaaacggatctagacaggcagtcgcaaattgcctctttgggaacgagggcgcatattgcctgattgggaacacggaccgggctagaatccgattagataagacccgggtagatcgggatcgtcagggaacccggttatcgggacgtatcaccctgcggaatcgtcacgctttccgcgtctcggcattgttgattatttcatactaggcataactggctttggcagttcgtttgagggggaactttggtttcgccaaggcgcctcaatctagaactttaaatttttatccggaagacatataaacatatatccgcttatagctcgttcaatcgccacggatgacgaacatcgcgtagaggtttcgaagccactcatacaaagtattgcccggcaatttcagctggtagtgatccaccatgaaacgagaagtgggaacaatcgccaaaacatgcaccatactttgtactgtgatctgcatcaatcaaatagtagccctagaagccctaaaagcctcatggatccagacaggtactccatagaagtcggaggaatcggacctttccggcttccaatgcttatctgttgaggcattattggttagacctggaatacaactagttcactggacccaagatttgcccaaaagtgggttcccttatggaactcggcctttgtgccgcgctttccaggttactttggatctattcataggagtaaaacaacatctttcacattagcagcaatactgaacgaaataatggtaacaaatcgtctcagccaatcgcaggccactgctcaatatcgcccttccgatctcctattccctcggtctggagtcggcacatataataactcgccccctttgcagaagattctaagataaatatgctagtcctcccaatttaattacttctgctcttataataattttttgttccctgaccaatctccactctttcaaagtctcccatcatggagcagcatcccgatgatgcgtcgctgcacagcggatatcacaatgacgaagacgagaagaaccatacgcccgtccacaagctcaacactcacgatttcaccagcgtggagaccctccacggaccccagcccaaccttcacgaatcaaagagtaccgagactctgaacgtcgacaatgaggatgactctccaccccccaagaagaaggcggcggattggcacatgacatcccatgtgatccgaaacgcagaacgggatgaagcagctggcttcaagaagcgcgagctgggtgttacatggcagaacctaaccgtcgatgttcttgccgccgaagccgccgtcaacgaaaacatgatctcgcaattcaacgttcctcaattgatcaaggattggcgccgaaagcccccgctcaagtcgattgtgtcagagagtcatggatgcgtcaagcccggagaaatgcttcttgtgctcggccgtccgggctcaggatgtaccacgctgctcaagttgctcacgaatcaacgcgaaggtttccactccatcacgggtgacgtgcgtttcggaagcatgactcccaaggaagcttccgcctatcatggccagattatcatgaactcagaagaagagctgttctacccccgcttgacagtcggtcagactatggactttgcggctagacttaaggttcctttccatcttcccgaaggagtcagtgtcgatgagtacacagccgagacgaaagcattccttctggagtctatgggaatttctcacaccgccggtactaaggttggaaatgagttcgtccgtggtgtctccggtggtgagcggaagcgtgtttctatcatcgagtgtctcgcgaccaggggttctatctactcctgggataacagtacccgtggtctggatgccagtactgcattggagtgggcaaaggcccttcgtgctatgactgatgttcttggccttaccaccattgtgaccctctaccaagcaggaaatggaatttacgatctcttcgacaaggtccttgtccttgacgaaggacttcagatctactatggtcctgcaactgaagccagacctttcatggaaaagcttggcttcatccacaccgagggagcaaacgtcggtaagtgtttcctgcatctgtcaaaaccccgacaccaactaacacaacgataggtgacttcctcactggtttgacagtcccgacagagcggagagtccgacccgaatgcgaacgcacattccccagaactgccgatgccattatggctgaatacaaaaagtccagcatctacactcgtgagattgcaacatacgactaccccgactccgaaatctgccgcgagcgcacagaggcattcaaggagtccgttgcgtgggaaaggtctaaccacctgcccaagggtagtagtctgactatcagtttctgggctcagctcattgcatgcaccaagcgacagtaccagattctgtggggtgatatgtcaacattcatcatcaaacaagtttgttcatgtatcatggccttgatcgctggttcttgtttctatgactcgcccgacaactcattgggtctcttcacgaagggtggtgctgtcttcttctcgctgttgtacaattgtatcgttgccatgtctgaggtgactgaatctttcaagggtcgtccggttttgctcaaacacaaggcctttgctatgtaccacccggctgcattttccttggctcaaatcatggcggatttcccggttctgttgttccagtgcactatcttctcggtcgtcatctactggatgtctggcctgaaacacactgcggctgctttcttcaccttctggattattctgttctcgacaactctggtaagtcgtcgtttctcattcgatttctttgaactaagactaactatgactttttcagtgtattacggctgtcttcagattcattggatccgctttcagtaccttcgaagccgcgtctaagatctcaggaactgcagtcaagggtattgtcatgtacgctggttacatgattcccaagcctaagatgaagaactggttcctcgaagtgtactacacgaatccctttgcctatgctttccaagctggcctgacgaacgagttccatgaccgcacattcccctgtgttggtcgcaacctgatcccaagtggccctggctacgaagacgtcggagctgataaccaagcttgtgcgggtgttggtggtgcgttgccaggcgcgaactttgtgaccggcgatcagtatcttggataccttcactacaaacactctcaactgtggcgaaacttcggtgtcgtctgggcctggtggggtttcttcgccgtcctgacagttattttcacatcctactggaaagcagctggtaacggtggtgcttctcttctcattccccgcgagaaactcaaggcgcacaatgctgccatctgcgatgaagaggcgcaacgcaacgagaaggcccgcaaccacgaaacccccgatgcccccgccgaggttgacgaagggaatctcacccggaacacctctatctttacctggagaaacctcacatacactgtctcaacccccaccggtgatcgcgtgctgttggataacattaacggatgggtcaagcccggcatgctcggcgctctcatgggatcttctggtgcaggcaaaacgacactgcttgatgtgcttgctcagcgtaagacagacggtactatcaacggttctatcatggtcgatggccgtgagctcccggtttctttccagagaatggctggatactgcgaacaactggatgttcacgagccatttgcaaccgtgagagaagcacttgaattctctgccctccttcgccagtctcgcgacacccctcgggaagaaaagatcaagtacgttaacactatcatcgaccttctcgagctccacgacctggcagatactctgattggtaccactggaaacggtctcagtgtcgaacaaagaaagcgtgttacaattggtgtcgaactggtctccaagcctagtattctgatcttcttggacgagcccacctccggtctggatggacaatctgcctataacaccgttcgtttccttcgcaaattggctgatgttggtcaagctgttttggtaagtcttcaatctcctcaactacaagatcatattgctaacaagtcatgttctaggtaacaattcaccagccttccgcgcagcttttcgctcaattcgatactctccttctcctcgcaaggggtggaaagactgtctactttggagacatcggtgaaaatgcgagcagcatcaagaaatactttggccaatacggtgccgtctgtcctaccgagtccaacccagctgaattcatgattgacgttgttactggtggtatcgaggctgtcaaggacaaggactggcatcagatctggctcgactcccctgagcaaagccagatgatcacggaactggacagaatgattgaggacgctgcttccaagccccccggaacagtcgatgatggttatgatttctctatgcctctttgggaccagatcaagatcgtcacccagcggatgaatgtcgcgcttttccgaaacaccgactacatcaacaacaagttcgagcttcacatcatctccgccgctctcaatggtttctccttctggcgtcctggcccaagtatcatcgctctgaatctgaagatgttctccatctggaacttcgttttcgtcgcccccggtgtcatcaaccagcttcaacctctcttcatccagcgtcgtgatatttacgatactcgcgagaagaagtccaagatgtactcctggattgccttcgtcactggattgattgtttccgagttcccatacctctgcatctgtgccgttctctacttcgcctgttggtactaccccgtttggagacttccccatgactccaaccgatctggtgccaccttcttcatgatgttggtctacgagctcatttacaccggtattggtcaattcatcgccgcttattcgcccaacgcaaccttcgctgcgcttgtgaaccctctgatcatcagtaccctcgtcatcttctgtggtgtcttggttccatacgatgagctcaacgtgttctggcgtttctggatgtactacctcaaccccttcaactacgtcgtcaacggcatgttgaccttcggtatctggggtgccaaggtcgtctgcaatgaagatgagtacgctttcttcgacccgcccaacggcacctgcgcggattacctgtcggactacatggctggcactggtaagggtatcaacttgctcaaccccgatgctacctccgcctgcaaggtctgccaatacaaatctggaagcgagttccttaacactctccacatcaagaactacaccaccggatggagaaacattggtatcgcctggatcttcgccttcagtggatacgctttggtgttcggtctcatgaagttgagaaccaaggcttccaagaaggctgagtaggttgagcgtctgttcatcctttctctcaaaaggccatcatctcctcgggatcctcattacttgagctttcccctttcccgatctttcctcctattttctcactatttccttcttcacttcttccgttccttagaggactatttccccaaattttgccatacattcactacccagcccttcattcatggagccctgcacctgcgaatctcgatcctctagtcatcgagcatatttgtcatttccccgcatacatgttattagctagcatatagactgcatatagatcatagaccataaccatatagaatatagattgtcattctcaaaatgttgaccaaagaatcctcttcgagattaaattgtagcagttagaagatcattgatgtaggcattgcttgtttacatccaatttgtctggcctccctttactcctctaactagttatgattctttgtctttcaatctatgtcgctttgtgcacatgggaagctatttcgaaaaatccatgacagtagtccaatcatcaataattacttcttatttcttagtgacgtactgtacgtgcgtcacatatgtacgtgatatatatccacaagcccaaaagggaaacaaaagcatagatatatttccgaggtagtcgattcagactagtaatatgaacccgtattccaactctccgggttagccgccagtatgagaaatgtacaacatgcgggctactttctgaattttaccaatatccaaattgtgatgaagttgcatcaagactcaggaccacaagctggcgtgtggagatgcgtccatggatgtactggagaaattatccggagagccgagattgtgacacatatcccaccttcccgattaggcagtattcgaaaagtaactccaaaatagaaagcggaaagaaaaaggtctccaagattgtagatccatgattacctccaccgagcgaaaagatacagacccgaatgctcaaggggaaatgacggggtcgacccagcgtcatgggccaaccttggaagaaggaccatttgcatttctcgcatggccgatcattgcctaattattgtaagctgataccgacaacatggaacctccagccatacttaaactctctcattcataggagtacggagtagcttaccccaatttcccctgggggacatgaaaatcggagggacattgcgcgatgctgcacgcgagtggaaactcgcccgatgaagaacttgggatctgcacacgagctggttttctgcaggaactgtgatgagcactttcttgtttgagaaaaaaaaagaaaagaaaagtgcctccccgcatttcccgacaaaaatttgggtggcataggataggctagaatttctcatcacatcccagacacacaagcacgggtattactgtgttgcccaggaagcattgctgatcgctccatatatctccttttgtagaaatctggcttaggtggggagaggcattgaaaaatgggttgcgggtaagaccctcaagctagttgaacaagagagtattccgtacgctgtcatgataatctcgggaaatgtagagtttgaatgcatgctctttgtccatttcgcacagaaaccgtccttgttcccgcctcttttctatcacatcatccagccaagcaaagatcagcagtgatagagtaatagtggagtgaaataataggcgtggcgtcataagaacaaaaagcaaaagctccgccgtgagccttctcctcgtgtacctgtcgggctttgccacttgtgtggtcctttggagcaaataattgttgacttcagacatagtgcccattctcggctaagcgggatccttgctggaacaacaaacaatgtatgagttggggagaaaaagcggatgtgatgagtttgccgttgaagccataaatcatttggttcggcttaagcctcaagtccttatttccacatatggcgcggtgacgggataattgttcataaattgcatcaggtgagacttgtgctatgtcgaaggttacgaaacagaattctggaaacagtggagctgatgcgatcgcgcttgaaactggtaatgtggaggttgtttcatctcgggtgaaaatgagactctctcagtatacttcatagattagttcagtgaagccaaaggaataagttgtaatgattttggaagtgttgtcaagacgtgctggtatccacgtgacacgggcgcgtagtcacatgtttgtttttgtttcctcggcatctgcagtctcaataataggattacaggatcaataatctattctaggttctgactacggaatacggagtattgcccactctactctataaacatacaacatacaacatacggagtacggagtacggagtacatcgtattaaattctcccctctatcacgtcgccagcgcggatgcgagggcgatccccctctaaccgtgccgtcccgcactatacatactgagaatgattcaattagtctaacgcctatcatattgcccctttcatcccgtccccaaaaaaaatggcccaggtgtggggagtgcggtctacggtcagcacattacaatacatataaggaccagcgaaactattgatacaacggcctgacgcgacacaaagttatcaatagtctacggagtaccgtctgtactcctatgagaacgatatgtccatcatcatggtgggcgatcattatacaatatataagccgtacggagcacgcagtgcctggcgcgttcctccatccaaagccaagatagccttcttgtggggcacttcgagtcagcaagatccttcgttaatcgttttgccatggccatctttttgataggccctgctagttttctaggccccccacgcactctcaaacccctgctcattgcgcaacggccaagccgattcaggggcattgacagggattgtgctgttagtcccgcattgcaattcaatcacgtgagacgtcaaacaaagaactcgaacagccgggatctcaatgacgctttgagttgcatgccccgaaactacggtgacctcaaatcagtttcccggtatggaatacaaggtatgtaggttctggcctcgaactctaagaaaactttagaactgcacagccgcccccctattcaaatttgaggggacgttaaactattgattttaaagcagaacgagatagagtagctgtacccagcttagggtttgaaattaattaatactgacagttaatggacttcacaaagtggatttatgagcacatccccaagcccctgactgcgagcctccaccaaggcaaatccgagtcattgtccctggaaccggaagctctcccgcgagcacacgccccataactaggccaaaaagtgaaagggaaaaaaagctgtgatccaattttgggcaatgctctatctacctggttgaaatgtgggctctctggacgcgattatcgcccgtcccaatctaacatctcagatcccgcacaaagagataacaaagaaccatatcgcgcgtggcggtccagccggtcgattctcatctaggacattgcgtctatcccagtccgttcattgtgccgctcgtttgatgcatccgactgcttgacaggtacacggtaacataagctgtcatatacaatctattagtggcgtcggggatgtccaataccgaaaatagaggcgcagactagcccctaatcccggagacaggtaccgtctagaccgtggcgcggaaacgtgctagccagccgtgcgcgtccgccttctagtggctttctagacatcgcgcggaggcctttccggttaacttaggcttggaggatttcattttcgtgtgggtttctccttaaggcgaaatgaactgtggagtgtcataagtgtcatgagtggagatgtgtgcgtagcttctatctttctttgttgattgccttcatatcgccccatctgcgactattcctgggccgttctctttcatgcgccagtctaagtggggtctcgtattgaatcggcgatgtgaaacttacgccgtatgtattgttgaccgttacgatctagcaaattactatacaaggtccggtattatgtacttgttctcggggtactttttaccgctcactggatccctgtactagtctatcaattctaccattttagatggtctagatgtctaggattatctatctgctttttgggctgcttgcaatatccatacgattgtaaagaatttgcggagtacgaagtatactctgttattgaatggatactccccccaccgtgatttcatgagcttgcattatacatatacagtactctgtatgtatgttcttcattttttaactcgaactgtttgtcaatacaaagtacatcctataataaatttaggtatagatgcatgggccatgttacccctgtagacatcaaggtttcgtctttccgctcgcatccatggatgagctgcgttaaatttaatgtttaaaattcgttaatcgggttctttagtgatatacacacgctcaatgtggttgttatggtgcagtatttcaacttgattatttgactaacattattttgagcaagagcttaggctcgatatatagatcaagagggtgtacggagtttgtagctgacaattcacaacatacgaatcacgatacagcgagatatgatcttcgaatatgctctatttcgagattgaactgaatagtctagtaaatctaatagactgtgacacagcgtggttacacaatcgcaatcgtggggtaaaaggccatgaaagaacagcattctctcagccatcaatagaacctcgaaaacccggcgagaaagcataacacaacttcgaataaaaatatagtaaggaaccatttctgcttcccaaatcacattagaccctatagcagaccgactttattgagatcataaccaaaattgtaaggtttgagcgcgatcttgcagccgaatgcaggtacctgccgcataaaactgcagtgttctttcagcctcaaccgttcaccgcatctcaacaaccaaggccacgaggtgacacaagataatctcgaagacttaggccgacagccttcggattgtctgaatgcgcttccgcgtgttggttattggaggttgtgctacaagatggtgaggatagattatatggatgtgtctttcatgttgccaagcaatatatatttgaaaatctcaaggtctcaactaggttgtagtctaatacagaatctttctacgcggtcattcctatccgtggatatatatcggcgagacaagacatattcaactagtaggctactccataccacctgcatccaatagaggctctgtctaaacgaaagctacgtctggaacctcgtctactactctgactgcatagcataattatacatcgctatttggcacgttccactgaccctcggataccaacgtggatattcaagacatctcagatctctagcatgctttcttccagcaattgccctatgaggctaaccatgagtaagattgcatctgaagattagtatcttgctaatccgccgcaagtaagccggtcatctcccatacgagagcagtacgagaactagatcatgtcgcacgaaagagatacatttcggtggaggtatcacccgaggtaatcctccagcaaaaatacgctgacatcacgcagagacacatgtgtctatcaccgaacccattgctgatccggattaacaagactccttcctaaacgggcatatggatgccggtcgggctcctcaacctcggggaacattaaacagaccaaactaaatgtgacgatatcactttcccccgacgatctcttgtcaactagacgggttctgcagctcaactgcacaatggctatagtccaaagtcccttgggagaacgaccgtgcatgccccactacttgggcacgagtctgccggaacgtgatgtgctcgtgctatacagctagctgataaaatcgcaagctagcaagttaagctaatggactacatgcatatgcaggggtgattgatttgtgctgtacggagtactccgtacaccgtaggtaagatcgatgcgccatgagacaagcaaacagtttctctgagaccacgcgggctgacccgtcaattgtatcacgctatgagttgcattgtgcgacttgtttttgtttacagtgtattttcctgagatagtaagagattaagagagacaaagttccgaacctgaccataaccaaaccgggtgtaaatttgagtagcctcaatatcggttcgacgcgatttatatacgcgaccggtaaaaagcagatcatctccattagagatagaatgggacttggtccaggcaccacccctctgccactctgccatggctttgaacccgactactccgtacggcacggacattcgacccattgaaggtatggcccgcagatcgcattttgcttgcccacctaatgtgatggatatagagggggcttgcattaccctagtatgatagccgttggttggacccccacgagggcgagacgttcggagtatttttatttttttggttaagctgccaatgctgtttaggagctctagtcggctcggttgatagcttcgctgacatacattagtcgcacattagtttataggaactatcacattttgctctttcccaaggaggcaaatatcccagaacatgtgacgggcaaccaatgcatgaggagaaataattatgcgctttgcacatttcaatgttgactggcgactgcaggatcaccgagtttacgtagttctgcgaatcggttggtcgaactacgggaggacgtgcgacgcaactgtgatggggaatgggagaatggccctatggatactatgatggtcatagttgtgtattacgagctcgatactaagtgtctttctccaagcctagaccgtgggttattcaattttgcgatggttcgctcaactgttccgatgaggacctcagaacgcgttgaccagatattcgtatattccacctagcgtttatagaaaatattccgaagttcattttaagtcgaggtacttcgtacattctattgcaaggcaaaagtacatcgaattttttcaccggcaaggtactcccgtatctcgcctcgcatctattattattcgaggtcttagacatgagcgggtccgcatcatgagatccccctccacgtactccatagctacgatctagcaaggattgaggatgcctacaacgtatgcaagcatcgggtagcgttgcgacagtgtttgctcaactttttcgcaactcgcaacagccaccgtttgtggatcctgtttgccaattacgaacctgttcctacgattatcgccccacgcgggagggggaaagaaaaggagggggatcgcagtatggtacggagtactcggtacaacgtacatacaaactggtctgaatgtcaatagagaccgaggtctggacaagggggtgagcagggatattgggatttttgatgtgaggtacggatcaccgagggatatggaccctatttgcaatccgctggaaatcaaccataacggtcagaataaaaaaaaggcttttggctgctgtcacattgggggccactgcgttgtcgatctcatcccggagagatattgatgacaggcgaacaaaagacccccgtccgtcacttttaatgattgatcgagtctccctgcaggctctagcacacaacacggtcaatgcattttaagacatgaacctaaccccacaggatttatttggttagggcaatgtgattggtctcagacgggagtagcattccaattctaacaaattaaaacggagaatttgtcgtggaaggtctggaacagagctcggcggacgcaaggtggatagtgagttgatacatgtgagatgtgtaccttttcggcgggttattagggttgaaggtacctcctgacctggtaccgtgttatgaagtgagtagataggccaactcttggggaagaagggctatctccaaggccggtttttttttgttggatttcttctcttgctattactgtaatgatctcaatcttggatcttcttaccaaagataccccgtagatactattgaatacatgttgtctgcacataatcccaaaagaataattagccaaatccaaataatgaaaaaaacagaaaaaacaaataaaaaacaaaacgcaggaattaaaatacggccttcggtatgcgtacggtacatcgccatacgggctcataccaggtggagcgtggatcgtcccgatcgagtcccagaagattcaacctttagccctttcaaactcccaaagagctattattcctcttatttccctcttttcccttctccttttgattcaaagctctcttcattttccactttttgtactgttgctaccggtagcaatcgcgatacttagctatacttagcattctttcacttatatcccttccgcccttgcgttgccttaatagggaatccctcttttccagctttgcgtacagtccttgctgcgatccttagcatcttgccactctccccttcataggcatttgcattatttatccattggaagctgttcatcccttgatattgggacctcgttgcgactcgtcatccctccgggaccttgaataatccggactccttgaaaggaagtctgtttggatctgtttatagttttcgattacttgttaatattgcttcttgtgtttgtatgtccagtgcaaagttcctaaatccttcccctctcctggcattcctagccctcaacctccttgggcgcattccaatcattcaatccctccagggctatactctatactatccttgagccccccaattgacctagattgtgtaggatcaaccccagcctctggcgatctgattcctcccctccatccttgattatccaacgccacttcgcctacgatacttgactttcttttggatccattgagccatgtccattgcacttatcgaataaacgcccccggtcagtgacctcaacggcgagaaagaaattactcagtcacgatatacccaagagatggaatcaatgaagccacatatccccccattgaagatctcgaaatccaattcgaatttatccgagtcgagcaacgacgctacatctataccgattcgatcttactccggctggggctcatcagatatgacccctccgttaacgccacaaaacgcccaggacacaaacatggatcaattggaagccccgaggcctgtctttcacaactatctgcgcgccttctacccttttcacccggctggcaatgtctctccttcgaccgttacactcccgctggaccagggagatatcattttggtacactccgttcacaccaatggctgggccgatggtacattattagattctgggaatcgcggctggttacccacgaattactgcgaggcttacgaccaattacccatgcgtcctttgttgaaggccttgactgatttctgggatatcattcgaggaaacttcgggtcatcactgaaggactttggaaatcaagacttgatgagaggccctatcgctggcgtccgctttctactagtaagtatgaattagaaccgagaaacaattacggggcttatcattccacaggaaaaatcagaatgtcttactcgagaatccgctctggtaaggcgatttgagggactacgcagaattcgaaaggctttgctatctgacctgtcttcgctggtgaaaactgcgaaaaagttccaggaaattgcaaacgggctcccgtcagaagacgaggttgaggccattctggatgagatgcttctcaaggctttcaagattgttactagaggagttcgattcctcgacgtctggaacgaggaggtaggcttgggtcggactatcgccgagatggatgggcccaacgaaagctcaggccagtatagcatgccaccgactcctgcatccgaaactttcaacttgggcgagaacgagggacctgatcgatctgcgtcgcgaatgctggaatcacgaatggaccatagccggatggatatgagtcgatcatcgatgcgcacggagatggttgatcctagaccggcctccgtcgctaccaaacgggtttctgtatcccaccgcatgtcagtctccggcccttcgactgccatcgttgcccagaatctggcatccgaacgcctgggaacaacatatgatgcattcctcggcgtacttggctcattcctcgggttccatatgcagtcccgctcctcgatggagttggttgtcactacacagcaggctgtcgaggcatgcaagcaattgctaaacgtcattgaggtagtatgtgagcatggtacacatcgcagcgcgtttctcgaacaggcacgagagttaatgtgggagaagctatctgagctcgttcacgctgcacgcgacgtgtttcgtcccgcacaaatgccagaagatgatctatttttcatggtagatgaaggaaaacgccttgtgggtgctgcgactgactgtgtccgagcagctggaaactgtttggccaaggctcgcctggtgcttgagcaaattggtgaccttgagcttgaccctgaacacttcgaagaggaaagacaggaattgtctagcgttgcctctccacaagatgaaccgcagactcccgtagaagaagagcgacaggagatgtcacgtcttcccccacctcctcttcagatccctagcacacctgctctcaccgacgctacaacaccttcatcctttcagtctcttcctgcaaattcccccgccaacatcaccgccatttcttctttacctaattctgccatactccccacccacctcgagaacatctcttccttctcctccactgacagtaactaccgtgaaagtcatcccaagtctgatatgagcgaatcattcggacgtggaattacaagcaatggcagcagcttcacgtataatagccatgcacgtgattctgagatgagtggcgtttcccaaacctcgactcgggctacctcgcctgatattgggggtagcttccagggtagcttcaaggttcactcgctgaaggagagtctgagctactccaccctcgccgaggaaaatgaggagactgaggccaacatcctggagaagactttcgcacacgaacttatttacaaggaaggttcggtgatgggcgggagtttgcgtgctcttattgagaagctgactgctcatcaatctacccccgatgccatgtttgtttcaaccttctacctcaccttccgtctgtttgctacgcctcttgagtttgccgaggccctcgctgaacgcttcgactatattggtgagacaccccacgccgccggacccgtccgtctgcgtgtatacaacatcttcaagggctggctcgagtcgcactggcgccacgaccgcgacaacacggccctggagttcatcgtcgacttcgcaagcacacgacttatggcggaccttcccactgctggtatgaggttgcttgatttggccggcaaggtgtcctccgttggtggtcctcttgtgcctcgcctgatatcttccatgggcaagaccaacacttccattgcccaatacattcaccccgatactcccttaccccctcccatccttggcaagaaggagcaccacttgctcaagcaatggaagaacggcgaagcctctataaccatccttgacttcgacccacttgagctcgcccgccagctcaccattaaggagtcacgcattttctgctcgatccttcccgaagaactgctgaacacggaatggactccaaagtcaggatcgttggctgtgaacgttcgcgccatgtcaactctctcgactgacctcgcccacctcgttgctgactctatcctatacctcgaggagcctaagaagcgtgccgctaccatcaagcactgggtcaagattgcgaacaaatgtctagagttgaacaactacgactccctcatggcgataatctgctcattgaactcgtctatgatctctcgactgaagaagacctgggacatcgtatcgcagaagaccaagactgtcctcgagcagctctgcggtatcgtggatgtgtctcgcaactacgcagtactccgtcagcgccttcagaaccacgtccctccttgccttccatttgtcggtacctacctgaccgacctcaccttcgtcgaccacggcaaccaatctctccgcaccctctccacccatgacagtgaaatgactgtcatcaacttcgacaagcacatgaagacagcccgtattatcagcgagctccaacggttccagatcccctaccgtctgaccgaagtcccagagctacaggtctggatgcagaatgagtttgtgcgcgtgcgctcaaacggcgaaatcaccacacaaaccttctaccgccgctctctggttctcgagcctagagaagcctcccgcagcgcaaacaaccttcagtcccagtccgagcccatgccttccatgcttgacaatgccaaggacaagttcgacttcctctcatggaccaaccatcccaaggcgaagtccgtcccgacacacggataactcactcactactatacaccatcacctatcccatccctcagaacctaatgactgatgacttcttcttctcattcccactttactggtgtccacatccacatcatcttaaccattctattatgcatacgtgcatcaattttctcaaaacccatcttcttacgatttgtgaatatcccatcattcttgtcttacctttttactttttttattttactcttgggtttcttgtgtcttgtttttgcgatttctcgttcgagagatgcagcatttgaaaaagcggctatgtatggaacggggcctgggactacccaaatggagtttaccaaaggccttgctctgttatgtttttttagtttgatttctttcttgtctggtctgttcttatttcggctggggacgggggaaacaaggatgggactggaaaaatggtttcttatctgtcaactgggcgttttcctaatcggataccctctagacaatatttcggcctcacggcttttgtacaggagcaactcttaaaagctgcctgaaaaactgaaatgcaacatacgctttaattcaacagttttcttctgaaccattgtaactgtagactgtagactgtaaatgtacctctgtctgcctcgtacagtgccgacgtggccgctatgctgaattttcttcagtacatgtaaggaaaatgttcagaggatctcggttttgaataccagagaaccccttcaccgtatattccagccgacaaaccacttcaagacattcagatgctcaggagagcctaaatttttctcgacaccagcaccccggacattgaaaataatacttagaatgccaatggctgaccgcattatcccacatttcaggttcgacccccatttccaagtacttgtcttcgtagccatcccagtactgtattcgtcgtgtgcgataccttaggcagtcgcagcaaaggccaatatttgcttcaggtcgaccggaattgtcacggggtgctattcgccttaggagagtgaatatatcaacacaggttgatggtggaagaaatctgtgcttgggtactgatggtatgcgaattcggacaagtgatgagacgtgtagcaggcgcttgcatgtcaacgcaaggcacattcgatccagatgttcacatttgttgaggatatcaacgattagttcgggaggtaagctaagtagattgcaggtgatttgtggttctgctacgaggatctgagagggattagatagtgaaggacccgtcaggaatttgagtcggtctagaagtgctcacgttggatggccgcttgaaacggtgccgacaagaatgagtggatgttggtaatgctgacatcgtatcgttatggtgggcaaattttcttgacgcgccagggtgtttgttgacttgacggcgcgaaggagcagagccgcaaaaggttaaatgcatggttctgtggggttgatgcctgaattatagaccgttcaagacatgattcgggacctgggtgcaagtttgacaactcttgattgatatatcacctactgtacacatcgtcatttcgtttaaacatattttgcattatcgaaatccctaattccctatacaagagccttagactaaccaactatgttacataacgtgttctaaacgcctccacgaaattcatgccgtcattgtcatcataagcagatgcaccggtatccaagtcgagcggcaatgaaacagcagtctcggagagcgttcgtaaatcaagtataggaatcattgaaggacggccgtgggcgcattgaaacgggaaggcacaatcggccagcctggagaccaaggcctggcactcttcgatgttcaacgagtcattgaacatgatagcagtgcgacaggcccgggaatttaataggtccacgatgccttgagggcatccattcatatgttgaacccatgagcgcgaggcggacgattttagggttcctttgtgtacaacgtcatcgctgtctgatagttcgatatcctggtcggcatattccgtttcaaatgccttcttcgactggaacggcttcctaccatcttcctcacttgaccaaatctcacgcctcatcaagtcaatcaacacgcgaggctcgagccgacagcgttcggctattaggacagggacagtgtggacggtgatcgagacagtagatttggtttcgccttgtgtcacatactcaataccccaggccgagaagagagccatatatttttggaagaggtcaccctctgttgacgaaacttcgaatgctagagagccgacttggacagtccgcactcgacaactcgactccaaattctcacccagctcagcagagagaaacatctccttgaacaactgttcgattcggcatcgctcatcggccgcgtgctgatcgattaagagtagaacatcgtttgatgtctcctccaaattgggaatgacgggagtcgtgtggaccttagccaagatgaacttgttgtccacctgggctatcacttcggcagtctcgagcgcacggcgttgaagcttgcctcgatatttggcaacttgcgctgtatcaagcgatccaatgcctttgaagcagccgtgcgaagaagtaattacattctgctgaccgacggactctgcgcctagatttggtattggcatttctgttcggctgaaggaaggattgtcccatttccctaacagattttctatccaaaatgtttgcactggatgcttggacgaggcgttggcgcaatcggtggaagaccgatgggtagctaatgacttctgggcgtccatcgtttggcccgttcgagaattaatcatataggccatcttggtgtatggatcgatccagctgatcatcttgtctgatggcgagtctccaggcagatcctctgtcctgttcctgtcctcaccggagactcttttattcgggtggtttggaataattctgcactcctggccatcatttggatggtttgacttatggttagggaggatcggcaaggagctctcaccctgtattatattaggagccgcatgggaaagccgagatgtttgatgggttggagaacgtcctttgggacccttagcggcttttatcctggaccagttgtcgaagctttgaccagagtttagagactgtgctcttggaaaggaggggatttttagacgaccgctgaacacctcttcggtgctagaaatagaccgaccttgttgtagagggccacgagaaccacgagaactgccagctgctcgagaggctttggaacggatactctggttttggtgtgataaaatggtctgctgtttgcggttacgagggcggagattgtgttgcttcagaaactcatgaaccatgaccccaagcacatcaactatacgctgaaccgatttggccgactctggaagattcacagacgcatcgtcgcccaatcgtataacagcgtttgtgtcaatgcgaatgtaaaacattggccacttattgacgggctttgcccagcttcgagtgcttgcgttacttggggcatcaagctgattcaacgaagatgagcttctgtgggaaatggctccaacattactgaaatcagactcagcaaatagccgatttacttcgtcataaagcacatttgtgctgttgcgcgataggatggggtctttccccaaagagatgaactgaaccttccgacttgggctgggttggagagatattgctccccgaactatcaggtcagaaaccgaggctgaaattgcatgccaagaatcgaagtttggtgatgtgatcagcccggattgtgtcagaattgacccgacacgtttgagatcaaaatccttctgagcatgaggaatgcacgcttcgggtatagaggtagttccaagacgaatagaaatccgtttatttcgttccacatcgaggaggactaattttgagaattgagggttggctaaaaggagagacaccaaagagttcctgagatggtcccactcccgttctagctcgtccggccgctgaagagtgagagctcgactcttgactcgaactggcatgttcccaaaaaggtcattgacagttatagatgtgccatggccggcaaagcgaagcacctggtgtggtggtgcaggggttagccgagccacaggtgtcgaatgatgaagtatgattgagtttgtgcatccatgatgaatgtgatgagaagtcacagtgagcagagacaccgaggccagggaagccaagaacaagccccgatggccatacaagccactcagctcgaatttggatgtatctatcgcatatgttagctagcataaataatcctaaggttgggagacatgcgatgaggtttgcctagccctccggtaacttcaaactcggccggagggattccatcaccatcatcttcaactatacagccaccacgcttgaaatcgacagtgacgaagacggtatgtgcattggcatccaaagaatttttgactagctccaaaatgacaccagtcagatgcaaaatggatgtagatgatttgatctttgcaaccacttcagaaggtagcgcttgtatcatagaccgagaaggaggcattgacgcagttgtattcaccggggcattgtgccactagatgcaagaaagatcccaaaatggatcctggaaacagtactataaatacgcatttcaatcatgatcacctgtcattgtcgctggtagaacctttccaataggtaccagtcaatgacttgcgaaaaataaaacgaccgaaatgttgagaatacgtcacacaatagaagtcgagaggcaatatcgaaggcaggcacatgacgtgcgcggataaacagtctccccgcccgctgccccatctgccgcggcgcgacttgatgcccagagctctacttactcccctgcctacctttgacatttcgcaagcaagagtggttagtgactaggctacctctccaagctagaatgactactgccgatggtcctgctagggtgcatggtaagtacatatgtacagattgtgcctgttggccaccgcgaacccctgctaagggattcatacaaaacagaccggaatgcacgtcgccgcccattctcgaactgggtgaaacgcctggcgaaccttaagagctcctctgattctacgacaaatcgatggaccaacaagcgctccacgggcaataagggcaagaaggccgaccaagaaaacaacccatacccgctctctggaatcatcaaccgtgacacagggactcagacaccgaccgactcatatacagatgatcattatggtacaacatctcgctccagaagcgacccatctttctgttcgggctatgagaacccggttcccctgacaagtgcaaaatcagctgcgccaactatttcaaccaacggcgatgccgcagtatccgaagcagcgtattccaaggctgggacattggcaactggcactgaaggattaagcagccatggagggggtgagggcagcaccttctcgtcgccggcaccttcaattcgatcgatgaccactaccctgaccactgtgcactcggcagcaccctcaacccaactgtacaatgcacaaaacagccacaatgggcaccaccatggcagctcagcacagagttcttcaaaccagcaggttcaattttcccaccaattcccttcaacctcacccgccactgcagtcccctcgcacctggcaccacaaagtcatgcgatgacgtacagcgctgcaaccgcgaacaatgctttgaccgataacgcttctcttctcaccttggcaagctcatccaagcgccgtcgccgcaactccctagataccaatgcgtctgtacgcgggttggctccgtcttctgttttcggcgggagtcgggagagcttgccgctgagtgttctgagtggaaatacgactgaagcatccaatacctcagtattcaatgcgtcgggggtactgagccgaccgagtattgttggccttgctagtgctgaacgcatcagtgtctactcggcctccggagcaattccgctagccaccactactgcggagcggggcggcttatacactactaagcaaaccgtcggcggtgatacggccagcattcgcagcgttgtccaatcgcacagccgacatgacagtactggtgccagtatctccgggggtattagcagtccatatgccgtggctggtcgcatgagtcgaagaagttctggctggggagaaattaccggcgaggaaggtaatgaaggaaagccagttgagaaaaacgaggatgaagccgcaattaaggatggtaacggctttcccgttgagcggcttaaggcatgattccacttcgcacgtaccggcataccttccagtaacgattgaacggtgaggtgtgcttgaatgaaattccggatggacatttcgaaagcttgagcgaagtatcagtgatccgctactacataatgacttgatgcatggcaatcttccaaggacttgggtattcttaatggtttggcggcgttttctaggcttggactttgataccctatgcggtatggacaaattatttctactcaatccatattgcatgcaactcagatctttcgtgtattcattagatctccctagagtccgcttcgggcgtttttatctctacctaccagttggccctcggacaccccttttcatcggcgccgaatgaccatgggcatatcgtactgatacacgaaccaggcattttgatagttccattcatgcttggggtcgaccaattgaatctataccgcgagttagcaccaaaaagctggaatccaacaaacgccaataaaccactcacatcgaacgaggtgtacagcgacgcgatcagctttttgatctccaacgtagcgagataccggcccatgcaaacccggcctccgccgccgaaagataagtcgacagtatccttcatccgacgcaggcgaacctcgaagttctccgggctttcgtccttgccctgcagccagcgatccggattgaagtcatccgcatcatccccgaacactccgaaatcacggttcgtgacaaaggggttaatcccgaccttagtacccgcggggagatatcgtccgtccggaagcgtgaatccaccctctggaacgatacgctcgaagatcatggcaataccagggttgacacgcagggcttcacgaatgacggcatccaggtacggcaagtcgcggatctccttccagggagcgggggcagagataccggcggattgaagttcggcgacaagtctggccgtcgcagcaggtgatttggctaggtagtaaacggcagcacgcatggtggctgagcttgtgtcccctccagcgagaatgctcagcatcagccagttaacaatttggttgtcatcaacgagatcggggtacgtttctttcagctgcacatatttgtcgagcgtgtgatcgacagtaccggcggagatttttttctcagcaagctgggcctgatactcggcgacgactctgaaggcgtagaggacacctgtcaaggtgggcttgggcccaatgcgcttgattgggttcttgtcgaggaagttgtcaacccaggggatttgagagacctggtgggacgtatcagtcaccctccttgcttacgctgaatcattgatatcgcagttcttaccggtgcgaagtatctcaggccagcagtggagtctgtgatcaaattgtcgacatccttctcctggtcaatgaatccatagtgccgaccaaagctgtaattggcggtcacatcccaggcgactatgtgatgtgttagctgaaagctgcgcaggctgctagggggcatttgagagctcacagaaaccaatccattcatctgccgggcaaacctttcctgcgttatcaccatcgacaaatctcagcgcaagcttgtccacaaactttgttattgtttcatcgatgaaaggctcgtattccagaaccttagtcatggtccacaggccccggataggtcggatgttctggttatgccaatcttcatcctgggtgttgaagagattcgacattcgatggccttcaatcagtacatcattggggcggtacatatcactctttactcatggttacgactggtcagcatggcctattctcacatctaaaaggacggcattgactaggagacgatatatccaacctttttccatggattgcgagtggaataaattgtccgaattagattcgggtctgatatgctcacgcaattgggcccgacctgcaccgctgtgccatatttccgatgtaattgaacattcttcagatcaatacgtccgccatatgcatgagccgcacgccaaacatcggtgatcttcgccaacgccgggccagggatggatttcaaacgcgaaaagaacacatctgaaatcaactttgtcacaacaagcaaacccagagtggccaaggcctgggcccacaggctggaaggaagagagatcatgtccaacgtgtataatgtgcgcgcacggaagtcagtgcagtgcagtgcagcaaggggattccgagtccaattcactgccaatagttagactttcgagaagtgcaacacagtcggcagttgcagcttttcaatgcccctcgaagcccctaacccctagggctgctgagataacggcaggacgcgatttgtccatttttcaacacgagcggggttctttgcgggaaacaagtgaaagacgcgaagaagcgccaatgattctccaatgatatggaaattatatccaagtgggctttagctttcgtattctggcgcgggtggacggaatgtggagtcggtgattgattgtcgacggctatgaatggctcttcgatgacccgactttcccaatgcggctatgataaccttggctctagagcggttctgccctagcgcccggaagagataccatggatctgtaacagcctctcgttattgtgatagatccaccgccgccactaccattgtaaccgagtcaatgcacaatggcatacttgttcgtaccgggaaggcggcccaagttgaccgatcgcatcgctttgagatccacttgggaagtatgagtcccacttgctgtgacaataattaactttttcagacttcgcccctgtcgtatttcatattgtcgggacgttttagtttccgagatatgacaccctgttgacaatgcccatgcgcttgaaataatccgtggtgtgtccacatctggggacgttggatctttaaaccgacgggtataccccggactgtctgcacagcattggtgaatactcagaatgtcgtctagcgggggtgcatctctcccaccggagagccaggctcctacagtgaagggtgtgatgtggacgatgtcgatggttcctttggtcttcgttttcctgcgcttgtatgtgcgagtatacatgcggagagtgtttggctgggatgacggcattgcaatcgcggcaattgtaagggactccttttcgtgactgactgacttggatgatcttgctaacttcaattcccttggtagggttgtctgattggatacgctgctgtctcccatgtcgctgcaaacctgggattagggcaacaccttgaaattgtccagaaaaaccccgataacctcatccaggtggcgctcttatgcaacattggcgaatctctggcaatcattgcatgcaccctcggcaagacgtcctttgctgtcacattgcttcggatcgtggtccgcagatggatggttattttgctatggttcgtgattgttacaatgaacattgtcaacatcttggctgcgctctttgtcttcctgcaatgcaaagatcctcggcatctgtggaatccgatgatcccatcggagtgttggccgtcgcatatctttacgcatttctctctctttgttggtggtgagtctgctcgcagaagtctgctttggttgtgattgacgactaacacgtaaactccctcagcttattctggagcacaagatttcgtcctagccctgctaccatggacgattgtgtggaatttgcaaatgaagaagaaggaaaagcttggtgtggccgttgcaatgagtcttggaatcttgtaagtccttgggcggaagcccttgcaaacctcgaaccgtcccacatgctgattgacttatctcttcaagtgcaggcgcagcatccatagtcaagaccatccacctcgtggccctctcagccaaatccgacttcacatgtacgccaccattgttaccttcttcgtctcttgtcaggactaatttgctttctttgcttaggggaactcgctcccttattaatctgggcagcagttgaagacggtctcgctatcaccgctgcatctattcccgcgcttaagcctctcttgacaaggatgttccccagcacatcagcggacagttataacatgatcgcgtatccaaaacagccccccagccgcaagatattcgacaactcccagggcgaaacgcagacggatattggacacacgagtgttcatgacacgggaagtcaaacagcgatcctagagcctatcgttccaaagggcgaaaatatcaatatgataaccgaggtgtcggtgacctataatcacggctcgtgaaggactttgagacagaagaatcaccacaagcaacgggaagcggtcgaccttaacatgcgaatataattactctcaatagacgatttcatctggatttcatgaccatagaccctaattgtttgtctcaagtcgtaaccccgttcgtggtgcgagaaggtcagggtaaatctcgtggccctgtatgatttgtttatacccacttcgagtatctcacttgacagtaatctgagatgttgaatttaatggaagatttcttcgggaatgaaagatgagagatctgggagaggcctaaacagtgcaacgtgatatgccaaatatataacacgtggagaaagacctagttacaatagttggaaaaagtcactcaagaggaaaatatttagtctgctggtgctctccctaacagtagaaagtcgaccgtgattatttccccctctgcatcgttactatccccgtctccaaagtatctcgtggttgcttagtttcaaaccagaagctgcccagaactaaatagcgacgacttggtggggaccgtaccaagcccggtcgaccgcatgtaacaagctctgtcattaccgtctgttttccacatgaatcgcacacacttcttagcgcccttgtagttggcgcacttctcagcgcagtccttgaaagagttcgccctgccagtacccaagtctgctggtccggggtcatcaactttccagaagttagcatggcatgtccctactatgagattttatagggtagacaaacgcttagcatagtgaatcttgaatttctcgtttccagccgtgataatgcattgatcgtcgcgaagctctgtgactcagtggtcagtatcggttgagcagtgaaatgcgataccgcgggagtcattgaattttattacttaccggcgtcgaaaaggtttgtgcggcattttccatcggcgccttctccgttgcaattgacattgagagcatcatacgactgctggagcgtgtctagtttgcctttgagcgatgtgatctgcgagttgagggcggtgatctcatcatttttattggtgagatccagagccaatttgttcttgtcgttctcgcactgctgcttctggatgctgaggtcgcccttttctgattcacacttatgttgctccgcacgacattcttttttcttctcttcaatttcaccagagtggcgacggcagtcctcttcggcactctgggccgtcagcttgtccgcttcgcattgcgccaatttcgctggatccacttggtttgtttgacatatttcgaggttgtgcttagcttgctctaggtcattttggcaggtgtccttgctattgtcgcactccttcttatcctgaaggcactgttccttctctttggcgcattgttccttctcctccacgtacttttcgcactgcggttcgggagtcggggggccgatattctcgattttaacgattgacataaacttggttgcctgctgttgatctttattgctgctaaggacgaagaagcagttgccggctttgtgatcacccagtgttctgaaggaaattgcctcgcagtcctctgacgcgcagagcgaagcacattcgagggcattggccgccggcctgctgattttattcagcgaagacaggatagtcttgcaagtccatttccaacggccattaccaataacaacctcgtcttcttgcttgtctggattagagcagcatgcgttacgatcatccgactccaaacaggatggaaatacctccgtaaaggtaatccactcttcatcggacctctgatccaggttgtctcctaggacaaagaagcagttgtttccgcggggtggcttgccgtgtgccttgaaagatgatgcttcacaggacaggtcatctgcacagagtgatgcacactcgtgggcattgctgactttttgggctgttttgggattgagagaccccaaggccgatccgcaagtgaacttgaaggtgcggtcatcaattgtcacctcaccagtgggagtgggcgcaccactggtacagcagtcattaggagtagctgaggacaggcataccgagccgacgccgattgggatttggttggcgaaggccgaagccgcgcctagcagcaagaggaatgatttggcagtcatcgtcaatcaagaaacaaaagaaagaactgtctctggttgtcgcagaaaggcaagaggaattgcaggtgctcaaagcttgaataaatagcatagcgacacggccaggtcctccacaaccccttttctctcccccgcgttatagccccactttgatattaagacatgatgcaaagtactactccataagcgatcattaaggagagaagaggtgtcaaaatcatagatcgagtgataagttacattggtggacctggaagtgggtagctggagtgggtagctggagtgggtagctggagtgggtagctaggactctgggatggccagatgattcggttcagctcagcttctgcaggatgtggagctggaaaattgcagatccccagaaagcctaaaaggagaagataagccaactgcggaacgaatgaaaaatcggtaaatggccaattttatgcaggcaacaaaagccaatataagcaaagtcgtccgtggtcgctagttcgatgtgatcgaccgctgttatggaagaaacatctaagaatatcgatttgctgggcactgcctataaaaagccctaataccgccttccggatccgtcacgcggagtccactttctaatttccggcccgttccgcggggaaccggtgggtcgagccttccaacttatcaataacgtcatgccagggagtacgtacagctcccgtcagatagatgcactcaacaggagaacgctataggctgaccttgtgcagcatcggagtgagccaatcagttgccaatggtgcagcagatggctcagctgaaggcggcctgtcctagctgagccaacctgcagaaactagtgtcgctttgagattttcccaatggcgcagctgccgtgcaaccctcctgatcccgtcccctggagaaactatgtcacattggagtcaccctttcgtcccatgatggataggccaggtcgccccccttgtgctgacgtcactttcattaaggttcatggtcgcgtattggctcacaatctgtcggtatctttttggagggcaattgctgggtgatacatctcctgtatttacagaattgagctgaactgacaggcattacgcgtcaacggacgcgatggggctgcctgaaagcggcagacaagaagggggtgtcttcccctccacctaaggatataagtacgacttgaatcgatgaatcgtgaccttcatccttttcccaaagcaatttggtctaccttagctcagcaataactcaagtgactcgcgacagagatcttcataatgacggcaaaccttcacactcatgcgaagagcggaactctaaatctgaagaacattgtccaattccttatccaggtagaagtcaatgacgaagatagctatggtgatacggcccttgacttggcaattcgaaacggccatgttggtgctgtaaagctgcttttgcagaacgatgcggatgccaacagagtatcttcggatggcaagacccccctctatgcggccacgcaggcaccaaacagcggtcgcattgtcgagcttctgctcaagcacggcgccaagcctgatgagccggtctcacagcagaaaggtgacaccccgttgatgtcggcaattcgactaggcactagccccgaggccatccgtgccctcatcgaggctggagcagccatggataggccaaatgaccttggagaaacgcctgcgagccttgctgaaaagtctaccaacaccgctgtctccaaggctattcgtcccaaggacgataagccagcgtggaagcctgagctagagaatcttctcgttagctccggtcttttcgccctggcatacttcaaaaacttcaaagacgtcggcataaacgccataaatcgtgttgctgcattggcggagccattgccaggcgtatgtatcttgtcatcgacattctctcatttctaaatttgcctaatcccgaaatagcaaactacgtatccccgcacggtggaagagttcaagtcaaaccttcataaattaatcaagaaaaagggtcttgaggacttctacccagagggcaatgaatacgtggccaaggtagcggagaacgcattcaagatcctgaacgattcaaccatcccgggtgcaacacccaagaatgtgaccatcatgtcccacctggcgttgtatcagcctattctatactgcggtaagccaaagtcatcacatcgcatatgaacaccatgcttatactcgttgcctctagatgatagtggctcgatggatactgacaaccgcatgagccttcaggcagccatggttgaaaatatggcacatctcatcacggcggctgctaccgaggatcaaaggcttgttcatcttcgcttcatcaataaggacgacaaatttgataatctcaaccccaacgagctttccttgaagatgaatttctccccaacaggatcgactagactgggctcgaacctgaaagataaagtcttggatgactttctctatggcccaattaacaagggctatgtgctctcgcggccccttcttatcctgaccgtcaccgatggagctccaaacagtgaagatcctgatgcatacgaaaatgaagtcagggcatctctgaactttgtgaaggccaacggatacggagacgaaggtaagctttggtcgtagttctacgtcgacgataccgctaaccctgcatagccgtccgttatgaccttagccaggtgggcaacgcgcctgaggctactgcatttttggaaagctgggagatgaatgatcttgtccccaacaggatcaacgtgactgctggtaagtgataactgaagtaaattagaagtaacatggatcagtctaactttcaaatacagaacatttggatgcccagttcgagaacttgagagacaaccaggctgatctcaataattgggtacgtcttcccgggtgttctattggattttgacgcactactgacgagttcattttagctcctggagagactcgaagagctggtcaattattagatagtgtcttgcagatggaaatgaaaggtctcttgactctcattgcgatttttgtattcattgcaggaaatttgaaaaagaaaaagtatccaatctccccaacaactaggagtgaagcaatatgcggccacaactagatatataccggagcgagttgaataagtggtacttagaagcaacaatgaataattaagtaaaaagaatgactgagtctgttcaagctagacagtgtgccacggactagaactgcttcgtcgagatatcacactgttggtggctagctggggtgggtccgtagatctgaactttaactacctactccgtacctatccttgcgtcaagaacaggagaacaatatttgatctacaatgtagtatcgaagtcgaaatgcgatagcgtattctcgggggaccgttacgtcccaagtctaattaccaaggtggccgtaggctgatctcgaaaaatcgatatgacactatcattttcaccagattgtggaggtggagtactacttcacatacatgggaccatggattcgaggtgccttccaggccacagttcaacccaagctcattccttcaattgtggcaatcttccatccttcgttggtgtcatattgctgatctagctcgagcagcaagtccagcagggctattcaacagattagtatcaagccgaaggataattggagtggacacatacttcatcatcgacgtcgagctgtgtagacacccaaccgccctggcagggataagggtcatcacggcaggtagtcaggcaggtagggtcatcatcggaagtggcatccttggcccaagcactagagacagccaacgcgagagtggcaaataggaaggttgagaactgcatcgtgacgggttgtttaaggtcaaaattgttttggtcaagtaggagaagatgtaagtagacaaggtaatggagtgagtcgtgactgtagaggttatttatatgagcttcatatccatcctccagcttcagctgtgctgtaatttctctagccatagatgcatgatgtataagacttagctattgagaaatgtgggccagcgctagcaacattctccaataaaccgtatgctttccacgtaaggaactggggccttttttcagtgtagctgaatatttggacaaggtcggtcaataaaaacttaaaggtgcattgcataggtctctatatcgctctcgactgattggtcctaccaagatgcacgataaatagatctacggctcaagttgcaccgcatgtaggtatgatgacgatcgaatgctgcaaggtcgcctcttgccccattccgttcacggtggaccgttccgtgccgtgcaaccctttttctttcatttttagggccctgcacagcactggggtaccctcgtcattgaaaattctacgcaaggtttggggccactccgttctgcgttctactacacccttgatgttggggatcgccatgaaaatccatggttatactacatagaaaaaccacaaacttaatccttttggcttttaccgcggcgtaccccggaaggaagggaagatatccataaaatatacatttaagaagatcaccgaagtgactaaaatgactaccgaaattacatgacatgacacggccggcttactatacttgtgattcataatttcggaagcgatcatcaccacatatttcaacccacatcttataccagtggtatccacggttctagatgggcaaaacccttagacataaccgcatgcgcgtgtcagttacccacacagtactcggatcaatgtccaacaatagaaatctcttagtagaatgccgtaacaacatagtttggtctcgaccgaggaaaaccgggctagtacttgtgtatagagtttcttctttgctgttaccggaatatgatcaagtttaatgctcaagtgaaggagaagaatggcgtaatcaggtcatgttccaaggtttgctaactacatagttaccgacagagcacccaactatctaccagcaaaggttaaaggccaaaaaaatcccagcagcacagcatatcattgtcaagtggacgtatgtggacaaactaatgtacccgcttatttgcaaagagtgtcctgcattccagaaatggaaggagcgaagaagtactcaccaccgcgagggatgacccagcgttcgatgggaatgtagtgcttgttcggggttggcacgggcttctcaacatcgggaaagtttgcaacaggggctgggtgctcgtatttggtaacatcgtcctccgcgcggtagtcgggaggcatttggccgatgatagcgtcgataccctggggcgcgatatttcccatcttggcagtgaaatcaacaggtttatcctccttgtttgcccattctgcagagctgttagtcctcaacgtggttgtaaatttagcgagaatacagacctttctggacaaatcggaatccgttggtgatgctgctctggtaggaaacaaacaacagaccacgatcatgctgggacacaccgccggccttctcattgttcagtgtcagtggtccgtagggaattccccgtcgcaacataagatgcttctcgtaattggggaagtcatctcgaggcccacacttccggatgtgggcagcgtaaggacatttggtttggtcctcagggttgtaagtgaaggcatccgtgtgatttatctgttccagctttttaaattccgcttcggggtctttattctcctttttccactgtgtgaacaacttcttcttgttctcgataggatcggggttcaacataggcgatggatcttggtctgggtaaagttcaagcggggctcctgtacatatcaaataagtgaatgctgcaagtaaaggaatacacagcaagcagacgatcttaccgttgggccatcgtccaacaacacgggaggagaatttgcgaagctctgctgcagatcgttcgttaatgccctcagcgaccactttcttagtgttgcgggcacaccaactgaaagtgacatgttaagaatattgtagcagaagaaagccaaagaggacacgtacgcgacgaactcgggtgttctctgttcgtatgtgcggaacaccatgaagcttccctcgttggcccaagctgggtgattcccttgatcgccttcgcctccaacaagaatagcactaaagaggtcgtcagcgactaaattcactgacacttggtgtaaaaagtctagagcttacccagcctgaattggcttcaaacccttcttggcttcttcgacctttgcatcggtgtctagaccaatgacaactggctgggagataccatcaacccatccaaagctaaaccgtagatgttagtcttgcaggatttatgcaatgcgcctgaagtatcatactgttctctgtcatcatcaaggacatgtccctgctgccggaagacaagttggatacttggctttggcttgtcgacctcgagaccaacttcgaaagtctgctcaaccattttgatggtatcgactaatgtcttctcactttcaccggttatagtgaagacaccgtcgaggtatccagatcgtggggtgaattggtggaaccaatcatgctggtcatcgagaccgttatgctttttcttgtcatctccctcaagggggtaggtcatatcctcccactggccgttgttgaagacatcatcggtgaatgcctcggctccaagctggcatggtttagcacgctcttataatcaccgggtagtctcataactcacctttgctagacctttggcagagaaggcaacattgatggcagacatatggacgagacctttgagagtaccctcttccttcttctggtagattccttttctgaatctctcagcatcgcgggcagtcgtcagattaggaataagggcggccaagtgtttcttgaacagctcagggttagtgatgcggaagaagacaaaaagctcgtgcttcttggacagacggggcctggaattattagaatcaaatccgaaactggaataccaagaagggtattgacttaccagatgtctccctggatgttcttcttgttggggggtgccattttaacgactaggtcaattgtttccagttgcagtcgttctaggaaaagacttttgaggggtgaaggggcgagggatatgcagagctttcttataattttagctacaccatacaatggctaatgcttggaaatcgggcgaggtcgagacgtaagagcatgccgcggccaagcatcaatgatgctgctactacatactccacgtagcatgagctgcaagcagattgttctttcgtatccatctacgacatagatagactaatcacattccgtgatgtaaggtggctgtcccgagaattactgtacaaccatgcgatacaaatcgagaatatcactgtaccagctgacattgtcccatctaccgtggctgcctgtgaaagagaccagaatgacgtgtttagatagaaggagtcgatccattccccaacggagcggtccgagtttatgtagtgctccacattgttgcaataggcatacattgatgcatcgctggagacatggaagtgagatattcgcagctttggtatggtagagatactgtacacgatcctggcatatgcagtctggatactacattatctcctctgattggaatgcgacccaaccacgtctagtgcctggagtgcactaaaaactatctggcctgaaacgtgcatctcctagctattacggtatatcacatgtacctagctagcacctatcacctttcaattattatcaattgagcaactgcagatccagatcggccaaaatcatgcagcgaatacataatgtgacttcactacgccaatcgagatctgctgattctcaccgccaccaagtgaaaatgaatcgatcgaaaagtaaaaagataaatgcagacacatagcgggtctcggtgtagctactggatatgaacatgaagaaatatagaactgaaaataggtaataaagttcaatgacgcctaaaaaagtgagaattatctacgcctagagctagaagatacctagtagatttgccctgcaagatactgatcgacaaccgtatcggtgctgagaaactatgccagatactcaccgtaaatctctcccggaggatcaaatttgatcaactcacggtcgaggtactggattggacgagtcgagtcgggtcaggctggcgcatgatacagttgaatgaaaagagctggagagtagttggtggccttgggccgatagttaggcattctaggtatctaatactcgatagacgaaaagagcaaatagtaaccaggcaaaccacttagttactcacccataaacatggtcaaagctatatcaccaagacagcgggatctgatacttctcccaattaccaggagtatcagcgtccctgaacttctcaattccaccagcaaccccattctcatccacttcccaatctcccatttcaaccctctctgcccaattcaacagcaccttgtaaagctgagcaccatgagtttctcgaatcccattccaaccacagacttgataaagtttatgaggataatctatcagtttatgactggcatataatccaatctgctccctaatagtatctcgggcgtatcctatagacccgatgcgactggtaagaagcagtctggacatattcccggagtcctgcattctgcccttgttaatttcttccgtgtataaaccagcagggatatcaatattatccaaagcccggccccagggtgatagattggacccatctgctcggactaggagaaatggcatttcttcgtcgttagcctcatcgtcattttcatccggttcaccttgacctatagtacgacaggctacaaagggctgggttttcaattcagcaacagactgtatccgggttcccggagcaatgtagcggaaatgaatctggcgcacaggaagcgcggagcaaaagcttcatcaagtaccgactctagaaattagacatcgacccgggctaattgaaccgggagtagagtttcaattgacgtgagtgaacgcagcaatggatttatcgatatcccgcagcgtatattgacaatactcctatgggaaactggagtaagtggtcgctgatttgtagcccactcagaaaataaaaaaagtgaaagccaggatcctcgtgtgaccatcccctcgatggagtggatctagctgaacgaagagactgggcgggtttaggagttaagcacgagtcaaggctgactggggggtattcttcccatcatgtcgtggatgggagcggagaaatgaccggcgccggtccatgcatattgcagaatttgattgtgaagctcggcggatcgctgagggtcgaaagtggactcggacatagaaggactagctcagggggaaagcaattgcagcgtatgttgtcaaagcgaaaacaaatccgagatttgggtggattgccttagcgtctttcggggtctgatctcgctcattctagaggataagtcagggctcaaaccccatgcgtgatgtaacaagtttgggtatggagttatatggcatggaataaattgcttcaggtagctgactgaatataaagcagaattatagtttagttgcattcagttgcatgtcttgggcagtacttaggagaccaaaggggaaggaggataatggccgaggtctgcggaggagtagacggtgtcggtttagaccgtattgaagggtctgtatccgctcttctacatatatatcgccaaaaagaaatttaaatgcccttgcacagctagtagtcttctcccagcgcatttgaaataataaaccagtccgttcttcaatagtcaaagaacggagtgaacagcaggataagagttgaaatgaggtgtgttgatgagtaattcggagcatccgacgctgacaaagctggcaaggaccaccaatcaccggttgcaaaccccgatttcggggtttcggtatccgtttttgtgtgggagccgcgtttgtcgcaggatttgttgcaaggtcgagagaaaggagggattgggtaatagttgcatgattcatgaggcgggattcgtgattcctgcagcattcatctcataccatacaatgttggaggctataatatctacaaggaccgatcatcgtggagttgcctaattggaaaatgggaacgtggaaccgaggattagactcggcaggctccgatggtcggccttcgatcgactcgtttcgataacattgtagaccagatttgcagagggtgtgggaaggaataatagggtaggatgagctggacgagaaaggcaatgtacaggtataagtagggaatattcacaagcgacacgagatccttagtatccgaatcgggaggcgaatgaaggcaaaacggaggcaaacccgagggattaatcatcatccacccctccggcccccgggcttccccccactgaagattcaaagaaaaaaacccacttgtggccccgacttctctctccttctctctctccggattccatcttacaacatcgccaaaatcacgattcccacgaatcgaacccaagtcacctcgcaacaggttcgacatcaatcgcatccgcgacaaatccgcaccgagccgcattcggcatttgagtcacgtctctcccgtccgcgcaacgcgcattttcaccgtccatcggcatcgagaaaatcggtttccggctcctgccttaattgatcctacgggtaaacgggaaagccttcataatggccaactacaatgggcgtcgcatgcccaacttctcgcaatacctcgatgacttgaacgcaattccatcgccgtatgaccaggcccagcagcagcaacagcagcagactaccttcaacgacgaggacctagctctgttcaccaacaccgagttcttcgagttcgacaagttcaccgacttcaacggtctgccttcgttctcggcagaagatgacaagacacacgaggctgtctccgatcaatctgcgcagaatgtggatctgaagttcttggatttcttgaatggtaagtgtggctgatttcggtttctgtttttcgcatcgctggttggttagtcctgagtctcagctgcatggctttcccctgatcacaccatactccgcggacttgttcacaattgtgtctattggaccaatgtctacaacatgcatattgtttcattggttgcctcatgaattcgtcattcatgcctattgcacgagtccatcgttttggggtcgttttggcatttatggcggttcatgcgcttcctaccctcaatatcatcccacatccttccacagctttgacctccttggctggatttttgaaccctgcatatcatccttcccgtggccctagcagggttttcttccactcaaatttgactttggtcgttggcgttaatgctctccgctattacgccattccacgtgatacaaacccctgctcagactctaactactgctcggacccccactactcttcgggaaatcgaaacccgcgatgtggatgttttgaaattgaatcaatgctaacggctttacagcagagggtctcaatggcattaccgatttccagcccgacctgactggctccaacgtccaggtgcccatgcacaatgcccacttccctgcggttccgtccgttcctagtgggcctgtggctgcgagccaggcacccctgcagcctgcgcctattcacaccgctccgaaggtcgctcaaactccatcctctgtttctatgtcgccttccactccggttaccggcaccaagcgcaagaactcagcacactcgagccaggagagtgctgaggaggctagtcgccaaatggccgaggaggataagcgccgtcgcaacaccgccgccagtgctcgcttccgtgtgaagaagaagcagcgtgaggctgctctcgagcagaccgtcaaagagaccaccgacaagaacgacattcttgaggcccgcgtgtctcagctcgagctggagaaccactggctccgtggtctgatcatggagaagaatggtgccgacgagcagtctgagcaagacatctcgaacatgttcaagaagttcttggcctcacagaaggccgatgaatcaagtatttccgacctgaagcgcggtgtgggcactaccgtatgaaccattgcctaatattaaaagaggaagaaaaaaaaccggcaaaaataaaaaaaaaaagaaaccccagtcttatttgattgccctgctactctactctgctgcttcaggtggtgaatgtcctgggcttttgcttgttagctccatctcaccatctttgccttcttgttcatagtgttctttttccagcgatgttgttttccttgtttctagcagccagagctacttcagattttatctgcaggcccagggggtggtgggtggatgagtgatgtctctcatgcagttacaagaattctagatgcaagttttcatgtctttcagctcggtttacgcctgtccgacttgcgtagattatccgttttaactaaacaccaaataacctttgcttcaatctacatacttaaatgtttccaccctcgaccggcctcgctcggcaatggtaccgactggccgctatacaccttcgtaaacggactgatccacccagcaagctccacaacacccggctctgcaaattcgacaaaaaggcgtggatcatctactcccatcccccgatatatccagaaatgctagaattcctgaaacgcaccctacgcaaatctcgcggaaacgtgtacggtctagaccatgcggtcctcaacatacagctcccacagcagagtatgtggatgaacatgggctactgggaagtgagtccactcaattaaataattgtctggtttgaatccacattgacccgcttactagtatacaaatgacttcccagaagcctgccaagcgcttctagaccaggtcctcacagctgcgctaacaacggagaaggcatctgccgtgagcatcgtggatgtcgggtgtgggtgtggtgatcagtcgttatacatggcgaagtttttcaattgctcttcttctacagcccagtccgatcctgaaactgggactaggacagcaacctctgccccaagctccagtacccagtcagacatccaagcatcagagtcaggcctgcggtctcgccatagcaagaccaagccgcaatccccctctcagccacgcctagattcctatatcgggatcacgctggaacccgcacaggccgcgctcggctcacgtcgtatccatgatctgcagcgaaagagtgaaagctctttccaggcagatatcttctgcgcagacgccgcagtacccagctcttggactggggatttgaagaaatcaatcacggcgcttgaggacgcgtccagtaaccaaaatgaaaatgacaatgataacacgtctacatggctcctggccctagacacattctatcacttccgcccctcgcgtctccctctcctaggctatgcacacgacaacctcaatgcctcgttcatggcttttgacttgatactatctgacagtataacctggtacgaaagtatcctcctccgattggtgtgctggggcacgaactcgccgtttgggaattttgtttgcgagaaggaatatgtggagctacttgttacggctgggtataatcctgcttctgttcagatccgggatatctcgcagcacacttttggggggttggcggatttcattaagcgcagggctgaggaggcgaggccgtttgggatcaagctggggaagttccgtgcggcgagttttgtttttgcgtggtgggctaagaggagggttgttaggggtgttgttgttgttgcgaggaggtaatgaggggttggatggtgggtatgttgtcttgtgtagcagtattgtgagccgctatcgagaggagggtgttcggtattcatctaggcagcctttacttcaaaagtgtatgcctatcgatctacaaggcaagctaagttgtacatatcatgaaaaccaaacaatatcaatggctctgatatctacaagcttatatgttacataacctatattacagtaatactagggacctcgaccgtctaaggccttcagatagttgttgcagagcgaagcgactgattccaactcctaatgctacgcaaagcccccctcttactggcttattctccccctgcctataatttcagtaccgccttcacaattaggcatatttcctgccatgtggtagtagtaagacagtaggtacctacaacttatatataaaccactgataaaattaagtcccctttgtgatatcattattaactgcttgatcaactgctttatcgtcaactacttaagtgaccactttagcaaccgcttgaaaaaatgcttgagaaactgctttagtaactaatctatgaaaagacatgcacacaaggttatttaattgcttcgcttcgctccgcaatcatgtgactttccaatcctttttctcccaaataggcttaggccaggtactctaattcccttttccccacatagaacggggcccgtagtatgtatacaccttcccgaatgaactcattgttgattctcatcagattttcttagtctattgtctggtacaagctttgactattgaaccccggaaacatggatctgtccgagagatatccaccaagtatgctattggctgaagtcgccaagaagctgcacgatcatcacagtgaacttcgcgtctcccttacctccaatcacccgctgtgcgtagaagctctcgctgcaagtctggattgtgtgtatggcattccggaacgcattttctaccaaccacgaatccacaccgacgtgcagctttacgacaaagtgccctcgaaaatatcagtttggagaacaacccccccacagcattaagccgacgtattcgaaccacgggcaggctcgaatacgcaggttttccagagccgctctctcgcgaacaccatgccgcgttgaagaagaaggccgaaaacatgcctccaccgcgagcttctgttctcgaaatccgcgctttgcgcacagagaatacgcccgtatctattgtcgagaactcaacaatcagtgctgtcgattgggatgtgggtatgccgcaatgccacctcgatggagttgaaatgatctgggacactggtgctaccgccactatcatcacgaagatatctgaagtcaagatttccaagcccatctgtcagattcaatccatatgccgtacaccaattcgagcggcactcgcgtccagctttccttcgccgtcgagtttaccaacacgctttttacaatgaccgtgatcgcatgggtcgtggataaagaagcaatcccaaatttccggtcaggcatgatcctgggacaaagggattgcatcgatgccatccagtatagatctatcccgcgatcaattcttgaggccagaggggagtcggttgatgaaaagttctggggggatctcattctagagagctatgttgattttgacggaagcttaaaggagatcgtttagctttgcttgtcctgtattctgattttcctgccctgacgtcgctttctttatcaaagacaccgagagattttcatgtattattagccttcaagacatcgacctcgggtaaggaagacacttcgggagtttcatgtattattaaccttcaagatccatggatttataactatgggctgagtgtgctttctatctcccttttctgtatgttagaaaagctcatatgctggggaggagactcgttgtgcccattctctctggaaaggtcttgctaggtccggtataaaagtctgctttaatgctacaatatctcaagtatacttctataagcggtatagtttcgtgatcggcgtcccttgtgttgttatcactcatcctagtatcccgagtatcatacaatggctccattgtatcgctgttcaggcaaacgcctcccagcaagttgttagccctgctgaacacgcaaaattagcgagcgcagtacatgccacgttacaaaccgaattaagagccttcagcacactgcctagaggctaagctcgcagtctcgagtgtcaggtgaagtataaacggtacaccgatggattaggcagcttcgacgctttctacgccgtagttactctagagtctgttctccccagcagagttcttgtctaagtatgataagaatgagtaagtatgtcaaaagtctcctggatcgatcattgcgcatattcgcctcgctctctatccgcagtgctttctgcggcaaggccgtgcctattctttgacagattgtgtatgtttgaaaataaagctattcatatagtataaaactgtagcttgccccattctagatattcccactatatttatctaagtctaggtggtttgaagatgttccgaccgtacaagtctgtatgtttcttaacattgaaggcactcctaccatataaatctgtattcggatttgtatgttttttgatattgagctattcacaatgaaccgtgctcactagcgcattcaacaaattgcacccaggagccccacaggaccccctagtcttcctacgttgtacaccagcagcttgtagaatattccaagcgccagtgatgtggagacctaacgacactacatggcgcgctgatgtatctaaatgatacttcggatgaagttcttggcaggcaagcaatctccagaatcttctattcaattctcaggggaagttcaatttagtgaaaagaagttagccaaagaatgttgggtaccatcgggcgcaattgtcagtcctggcgttatgactcttatgagctctaggtttcagaaaatcgcttgttgcgtaatgacttgtatgaccctgctcttgaaaggggaaaattcctcgggtttggacgttgtggaaggttatatacaacaaagaagacgattctaaatgaattcagcaagaatggccgctccaatatcatcaacaactctcctaatcgctttcttttcagtctatatttctatattatagggacctcgggagtgggaagtggatattttatagtactagcttgtgggtttgtgggtcgccatagatgcccaacctccactcctgccctggaggatacagtttacaccaagggtatgtgctgcttttgggtgaagaaacttcgctctactatccgaggcctagtccggactctatactagattataaggtctttctaggccaaagcacatgcaagccacccgagcccgtggcggcctgactcatgatgacgtaaagaggcggtgactggcaccacctgatatctgggcacatgactcaagggggattcatttctgagaaggaatgttgtatacttgctcattcttattggcagtcaatctaaattataatccagctcactgtatcgtctttgttcattgctaattgctaattgctgagtagtctgactggccttccaagaatgctcaatatgtttcaggcaactagttcggcagttatccaaggctgaagccgctaagtggtgggtctagacgatcacatttgctttcggcgctcctttcttttggtttttttttttcgggcttgtttttataaacaaatcgcccgcgcttgatggcgaaaaaagcttttcccctatatattccaggcacctgatacttttctggtctgacagtcccaacagggaaaaagatactgcagccaagaagatctacaagatcgtccagattatacccgtgaagcggtcacccttggcaatatggatgatcagctgcctgtgattgaatcgcatctatcaagcgaaaagccacggacctcggctgagatagagagacggatcacatcaaactctatcggatcgtcgactggctcaagcagctcctttgaatatgacccacagattcataggctgcaatcgcggaatacagagctggacttggaacgccatcgcactggcacgtcgcgagcattgagcaggactgagacgcaacgcgctcaacatgcgctcactgtgggcgagagtcttcgatcgcgaccatcacggactccattgccagctttcggtggaggcaagccctaccctccacctctccctgaacgggaggattacgttgtggagtttgatgggccagatgacccattatacccactgaactggtctgtgaaaaagaagtgagtttcaccatgtctataccgtactgcgtatctagcgtgcagcgttcttactaacttttgcaatccagatgttacatcagtgccatgctcgccttcaccagtatttgttccaccttcgattccgccgtttttagtgcttcatcgagtaatgtttcaaaacacttcggcgtcagtctcgaagtcgccatcctctccagctctctatacatcgtcggctacgcctcaggtcccttggtatgggctcccctatccgaactccagggccgtcgaatccccattctcatcgccatgttcggatttggcgtgttcaatatcggagtggcagtcgccaaagatttgcagacactcatgatctgccggttcttctgtggtatgttcggcagttgtcccttggcagtcgtggctgctgtattctctgatatctgggacaaccgcacccgtggtgttgccattgccatattctcctcaacggtgttcctgggccctctcgtggcacctttcatcggaggcttcattaacatgtcatatctcggctggcgctggaccgcctatatccccgcgattatgggcttttccgctttcatcatgaatcttttcttcctgagggagtcatacccacctgttgtgcttgtggctaaggccgcggagctacgtcgtcggactaagaactggggaattcatgcaaagcaagaggagatcgaggtcgatcttcgcgacctgatcgtgaacaacttctctcgcccgcttcgactgctgattaacgaacccttgatcctagcggtcactgtctacctgagttttatctacggattgctctactgcttcttgaccgcctatactctggtcttccagggtgtttacgggatgaacgccggtgttggaggtctcccactcttcggcatggtggtgggcctgttcaccgccgcggcgtacatcataatctcgagcaaggcctacaataagaaactcgaaatgaacggtggtgtccccattcccgagtggcgtctcccgcctgtaatactcggcggtggtctcttcgctgctgggctcttctggtttgggtgggctggctttagtggtaacgtccactggatcgtacccaccttgagtggcctgtttactggatttggccttctggtcatcttcatccaattgttcaactatctgattgacacatatctcatgttgtacgtcatattccccattcctctaacttgccatgggtttatctaacatactatctacagtgccgcatcagccatcgcagcaaacacattctgccgctcaatggtggcagccagcttcccgctcttctcacgccaaatgttccatggcatgggtatccagtgggccgctacgcttctcggatgtgtcgcagccgtccttgttccgattcctattggattctacttcttcggaaagagactcaggatgaagagcaagttcgcaccattttatgaagctgtccaggagggacacgcagctgaggaggccgacgagcaggcggaggagacggtgcaccagcactgaacatataattgtcttgttttttgtacacgatcatattcccactagggaaatgtaattattaaaagtcatattttagcggctatgtttttgcatgtctcaacgaagcgatcttgattcaaacatcttcacaccattcttatacttgtactaatatgatgttgtatatcgggctcttctgtcggtctgatgatcatcagatcattgctgtggcaacagggataaattcaatctaaacattttacacctttttcatagccttttctggctgaagagaatatatcactttggtccccactggatattgggttgtatgatgaaaaataggatgagaatgaatgtatgaacgcaatctggatattcataggaactctcattgacctaacttagtccagaagcaagagtatgctaaccaggaaataatctggtgcttaataaaactgccatttacgacaacgtgcagagtcgaacggagatgaacacgtgactttatacgtagtatgtgtagtatatacaaacggagtagtagaataattatacaaagagggtgcactctatctcatcaattgagctggtgtaaaagaaaaaaaaaatgggttacttctctttgattgagcgtgtcatccttagtgcaggggccatgctaatcttctctgtatattttcatttgaccatatgccccgaannnnnnnnnnnnnnnnnnnnnnnnnnnnnnnnnnnnnnnnnnnnnnnnnnnnnnnnnnnnnnnnnnnnnnnnnnnnnnnnnnnnnnnnnnnnnnnnnnnnnnnnnnnnnnnnnnnnnnnnnnnnnnnnnnnnnnnnnnggtagcttctctttgattgagcgtgtcatccttagtgcaggggccatgctaatcttctctgtatattttcttttcaccgtatgccccgaagggcgaaaggacatccttatagttcaatataaccccacttttctgcgtagagataccgccttcttgattaggtgaatggtattgaagtggcagaaccagaccgcctaggaggtttgtgccactatatttgtgccttccagtcccccccaccgccttcgggttgggggtgcaccacaccgtaaacccaattcacaccgtaagcccaattttgaagccattcatattaattactatctttcaccctaagtatctacccaaaaagattcccctccctgttgcgaagctaccatactatgtgataatgtagaattctccctactaggcgacttgggtggcggtcagccgtacaatcttgtccactgtttatccaacttcttcctctcttgtaaagcttctttctctctcctggtcttaattgatcgattggcatcttttgtactgagtataccagagtctgcgatctcaggaatctctctcttagtgatttttcgtttccgaggggcctgtgtctcccttatacaactgacggtatcgcttattatcgtaagcccttcgctatatgtttataatagtagaacgcacattataggcctcgttagagcttcggtataaaggtatctataccgaatagcttcgaaagctctttttgattcttctctaggttttaggtactctttagaggggtactttctatactagaagaagagatatatagaggaagactgtagcctatataagatcaccgagaaggtaggatattcctatcgccttaaactccccgaatcgatcaaggtatacctaatattctatctaagcaaactctaaagagcagcaatcactaaaccattacttagacaataccccgacctactgttgcgtgccagattccttttaacaaaagaagtgcatttctaatcgaatatcaagtatggaaaaggaaaagaaaagaaacaaacgtgaaaataacaaatgggcttttatacccctttagggacaaagccctattctcgtttcccctagaaggaaggtacgactgcctgcgcaaacgaccaacagtataatcctaaacgggaaagtacgagtcctataagtgctaattgtaatataacccctaggtaagaatacatttagtccctaaatactagcttctcgttatccacatggttgtctaatatccgattatcttacgcggcctcaatctattcttataggcgtatcggcggcctaggcttcgctagataggtattatagaattccttaatcatctccggagcattcttaaagttacctactaggtactatacgggatctaggttatatcctaaccactatatacagtactgcagcttcctataatactttcttatatctaggatctttttaacttcctacttattagtctaccctacctatattagaggtagtagatctatatattatcttataagtagttctatacttactaccttttatagcttacttaatttaaatattaggtagatattaattaactatagtaggtctaatttatatatattcctaacctttttaataatcttataaggtctactagtagtataggagagtttttaacttagatagtcctatagctaatcctttatagtaataaaaactaggttactaatactaaagtcctctttataacgataacggttagcctattatacctatagttcctatgactttataatctatttatatatatcttcctagatctattataactttaagagtcgatctaccgcttcttatttattatatattagtcttatatagttctaattaaaagatattgctggtttataaccctatttaacaaagaaaggggacctctttattatatcctacggaagaattaatactataaaatctactattagtaggtattctaactagttatcctagttatatttaatatatagtcttaattactatactataaactaatttataatttcgctctagctatctatttataggtggtatatagtagatagtttctacttaatccctaggattttatagaactctatctaaaacttagagataaactatcccctttagtctaatataatagtttcggggattcctataatctatataatattatctataaatagatacactatctactttatattagtatctttataatagggaattaatatcggtctcttacttagttaattaataataataaatactatatcccagacgggaaagtacgagtcccgcaagtgccaatcgtgacacctactaccactactcaggattagtaaaactaacgagtaggaagtcgataagattcttatcgctaggatatactatcaaaaactacaataccgcgttcagtggctaggacacgacctagacttacaatagttttctgtaagtaacttcaagaatactcccaagaagatcaagccttccataaccaatacctacagaagcctagactaccgatacaattataagaatagaccaataatataaataaagatagattcttagacgaccacgttaacgatgataaacccacatttagggactaaatgcattcttagccgggagttatataacgatctaggaaggatcgtacttgccaaacggagcaggaacgactatgcccctataccttcccaagtagtttctcttttttcctttcttcttcgtacttagaatttggtctgaattgcactcttttctcctgaatcgaattggctcgtaacactggattttggtccttatatatgtgcataaggtcaaaaccatcagacagcgtcatatcggacgcttgccggaatgcagccttaagggtatcatccgataaagttgatgcgagccactcaccatattctttaacggctaagtctccgaacccgggaatcttcaatggacctatctccttcgagccgctttggttagcggctgcattggaagccgtcacatccaatccaggtaggtgagactagagagcaataatattgataggtagatacagcgaaccgtctctaggaatataactggtctttcggttggttttctctgtcgctactactcttagatataaagcttgtctcagattgcattggggacatctttatacatctctagaagaccgcctttctcggcgtaggtatccaatcgcttaagggtttgcgtacacaatggataatgcttttttaccactggatccacctagtagtaagggccgaggtagtatatagctaaatcacattttatcatatcatagacgtaacgccaaactacttgctgtctacttatatgttcttcggtatctagttatacgtctcgattatcgagtattctccttatcacagataattttcctcttctcccctttctacccagcggacagagaaatgtgatcttctatatagctaaaatatatctttataagtcttttgccacaggagaagcgactagaccacgtctagagttgtttctcgattggtatccagactatatcagttttattaaaacgtttagttagatcacgctgagaacgactattgaccgatacaataatcgccgtattatcgaccctgatcctcttattataagaaactttctcccgaagggctttctatagcttctcttccagcactaaacgtcagtatatgctcggggctaatactaggtcttcttcggtgtccttcaccacagccttattgttcagcgtgacccgcaattctatgaagtagtgaatacagcttagcgggtccttgtcatagatcttatctttctcctactcagattcctaaagaaatggtaaggtattcggtcgagatcggcatgcgagattgagctcatcgtcgagaaggatagataggaagggactacaagcggatcttgtagcataagggcttcggaagtatcccggagtaggagcatacaatgaaagcgtactggcccagctccgtaccggcatggcaagactcaatggatatctctttcgaatcaatgccgtcgagacaggtcaatatacatgtggacaagcgagagagaccgtagaccaatttctatttctatttcgatgttggaagtagaccgcccaccggaaggaaatgctgcaatgcacccacactcaccgaagtaatacgtccttcttcttaggagggaagccaccctccgatgatcaaaagtggaaaccgaatttggaagcagtgcgagcctcaatacgatttgcgattgctacggccgacttgaggccacttaacctagccaacgaatgcggttagaatacccccccacctactagccctaaaaccatgtgacaaacggtagacgcgcttcaactgccgaggataggatgttgaacacttgaagaagcgccttcaagccactctactaagtaatactaacccatagggtccaactatgagaagtcaatgccgaaggaaatactgtatgggctccaatgagacacggcgcatgcctaaacatgcatgtactggtagattagtgatagttgcctttcggcccagccgtcgggcattaatgaattgtgtgtgtgtgtgtgtgtgtgtacataatgggaacgttgtaacgcaccccagttcagaaatttgacaaaaccgttagagatgatgtccttaatgtatgtcttttgaccaccgcccttgcacccatcccacagaaagatacacgctcaggaggtacatcctggtaaacagctttaaatggcgtgattcaagttttttttttttttcaagcttattaggggtactcccatgattcaatggaagatgagacatacaagaaccgtttgatcctagcttgaagagtccttcaatgatatctcgtcgattgtcatttagacttgctttgctgtagaaaagcagtgcatcgcgataaagttcaggggagccttgcgcatatccttgagcgtcttccataatcatgtcgtaaacactagtttcgtgtaatacatatggtctatcgccattgtcgcgtagatctgtgtatataccgtctttggctcgtccatctatatggtatcgcgcgtagattgcatctccatagcgcttctcagaaatcgctatgcagtagcgagatgcccatggttcgaccattcgtattctcgccgttttattcatgacgtctgcgacgggaagatcgagaaacagctgttcaggtagggaagattccatgtttgcaatatcgtactttatagtcgctggtaggctttggaaaatagattcttgcgtcaaaatttcgctgtgtagcagacagtgcaagtatttgggggaataagtctaatgctacaggctcagccgagctatttgcgtggatgccgaaggattgtctgctaagtggggtcattacgtggatttacacgtgcgagagcactggagagatccataccagttggaataccttcaataactatcactactaatgcacggggaatcaaaagcggcgccaccttcatcctactcaccctggcgacacccaccgaactattggccgagcttgagccgtgagttagttgggtggatgaccaccagcaaatctccactgttgtatgtttttgtttttgttttatttagcttaagaatttaattcccacatagtatgtctatcattgcactgctaaaggacgttggccatgcgtcttgtatctatgagactttcgacatatgttgtagaatagactagagatgaataagctcatattttgacaatactgttggcttacagagctagttctgaatctaacagaacttgctcggactatttaccggtaacacgaagctttgagagccgtgctcggtgttttaacacatgtcaaacgacactcccctacataatgcaactgtgacatttaacgaagatcaggtaacaatatatctgacttattccaaccattatggcctgaacatatccgttgagaatgggcatcaaatacataaacataatgtgttttatgtaagaatagaatccattaattaacactgatctacgacccatagcccgggttctcagttttgtgagcatagagaagaagtcacgaagactatactttcgaattaagtaacacacgcagcaaaagacggccgtctcagtcccacataccatgtcgatttcgcgatataaggcctatcaattttgtatccttctctctcatctatgttgtcgactgtcacttcatgtggctctgtacacatgctcgcctttcttcttttaggttagaaccccttgagctctgcgcgcggcacatatatattaagttctgaccctctatcaggggttctcggctctttctacgatcatgtcaaggccgggacccagcccgcctgctgctctggtgtatgcacagatctcgataacgatgtcgccagctgtcatgcatgtaacataactgtgagtgaattcctattttaactagagtatataacattggaagtcgaccttctgacacaaatcttacttgatagtgcactagcgaagcaccaacctgctgctccgcaacctgcaccaacacagccattgacccggacacctgcggcctatgcggtagcaaatgcacaggcaccaaccccgcctgctgtaacgggatatgtacggatcttagcacagatcccgcccactgtggaccatgcttagcaagctcgtgtactggtgttaatccagcttgctgttcggggacatgtgtcgatcttaattccgacactaatcactgcagctcatgttcggctttgccgtgtggtggagcacagcctggctgttgctttgggcagtgtacagacctatttaccagtttgcagcattgtggatcttgcactgctgcgccatgtcctggcttgctaccggcttgctgtgatggagcgtgtactgatttaacgactgatgcgaaacattgcggatcgtgcagtacagctgtatgtgctccccccccttcattggatgggcatactaactggtgtttcctttgatagtgcaatctagggccgggaggtggaggctgcgttggaggtaattgtattagttgtcctacgaaccagcctttctgtcaatcgtcgaacacatgtgtaagtttccaactatgccattgtagaactctgaactaattccaaaaatcagtgcccgggtggcttcacgtgtatcaataatggtcctctgcctggatgctgtgggccattgaatgtctgtccgccattatcgaattatctcggtgattccatatgtgtgagtgatgcactagactccactgatagactttctgaccagggtaagatagtgtccgttgccatgtactcttatcatcgcgcaactggtttgtataggattctaaggtgaaccttgtggtcaattcgaggtggaaagagacggcgagaaaagcggatctgaataaatggcctgcaaaccacagactgtagcagattagtatagcttggcaaaagttggatgttcgagatgagtttattcatattgtacatgctatgtatgatgcgctgcaggtatattaacatttatgaatgcccgaaatgaatatgcaaaaaaagtctcgttacgttcttgaccggtcgttataaagaagagtctttcatccagggcacctcgacatcaagggcgtttgcgacccttgtcgcggaagcgagacatccctcaagcagtaccatcccgtcccagcaccaaccaccaacgagccagacatttccatctccattccgccaaaattggctcttgtcatccccaaacttcttctggctgaaaatctcattgatgatttgtctgctggtggacgatcgcaagacacgagtgaatgtggcagtgtaaaagaccttatcggggtcaatcggagaaatgggataagtcgtaataagagcggctgacggatgttcatggatcgtctccgtcgctgtagcatttgagcacatgtggagtgggtgaggtggtgattcgccgcgattcaaggaaacttgcgaccagagggatttgctagaatcaccaatcccggaaaagtcacggtgcacaacggattgaacggtcgtagtggggacggccttcattgcgcttcggagaggctggaaaatcgcgccaaccacatcaggcgtcacagccagaatgacatggtcaaatagccgtgagctgctctggccatcctgggtatttgtccagctcacttgaacttttgtgccgatgttctcgactgccgtaaccttcgcgccaagtttatacgtcaagtcttcggacagcttctgctcgacatgctggactccaccaagaacagtgtagtggttcttacggaacgttcgtctcccataaccgaccagatcaagagccgggaaatccattaactcgtcgtgtgagcaagtcgcaacgctcgcgaagaccggcaggaagtagtgcttcacgtagtaactgggcaacataatcctatccaaatattgacgcagagactcctccgtgccagacgactccagagtcttgggcgctacaaagaaacagcagactttgaaccaataatagcatattgccaggtagcaaatctcgagcagccacccggtccatgataagccctccgggcgcaggggaggtatttggtggttatttgaggaatgcatgaagtatggggaggtttgtttcgtggggttgttcggtagtgtcgacagggagtaaataaaccgtagcgagccgtatgggataccgaaataatcatacattcgcttgagactttcgtagtatccgtcggcgaatgtgcgcatgggaagatcgaggcgttgggtctttgcgcttccgccattttgggttgtgagattgtatgatgcggaatcgagcgaaagtttctcttgctgtgttttttgttgggattaactttagttcgcgcgagcgacgtcacggatgcgaaagtttgtaccttttcgaaaacttccacgtcgaatctcccttgaggatcgctcctgagcatgtatgcgaccactaacccggccattcccgtgccaactacggcaacatttttgtgtggttccttcgcctgcatggttcggaaggaaaggttggttcacagttccaagatatagagagcgtatacgtgcattcccgggattgagagagaagtcgaaggttaagggttcaagaattcgattgaaacaataattgaccatccacatgtggctttcaacatttcaacctttccctaggaggttagttaatcatgccccacattgtgtcagcaagggcctcggtataattccttgtgcattcatatccgtccaataatgcagaatatatatatcagcatatgataggccaatgccgagtacattgttcccctttcagttagtgcgaccttgaaaccactattgggttggttggttgggagtcacaaggacatgaatggcgccacgggtgataaattggcgccaagcctcggtgtttggtatgtgggaaaaggagtggctatgaaacaacttatgctgtactacagctatgttgtgtaatctcgtcgtgaagtttgtacaacgtatgttgtaggaatcaaattcttacttctatgtcgtgtgggcacctgcaggttccatacctggatgacataatcagatggctcccaatctttatcgcttatcgtcacgtgcgtgtttgttgacgcgtgattttggattttggactcgagaacttggataggcagggaaacagatcaagatatggattgagaggcatgcacctgccgttgatataaggtgttctggaacatccccaggaattgtgccactatcttgtcaactactgccatggcgcgccctaaaacagttcnnnnnnnnnnnnnnnnnnnnnnnnnnnnnnnnnnnnnnnnnnnnnnnnnnnnnnnnnnnnnnnnnnnnnnnnnnnnnnnnnnnnnnnnnnnnnnnnnnnnnnnnnnnnnnnnnnnnnnnnnnnnnnnnnnnnnnnnnnnnnnnnnnnnnnnnnnnnnnnnnnnnnnnnnnnnnnnnnnnnnnnnnnnnnnnnnnnnnnnnnnnnnnnnnnnnnnnnnnnnnnnnnnnnnnnnnnnnnnnnnnnnnnncggcgccccgacaacagccagtcttccaaataacctccgcattccctcatcgaccccgtccctcacaaaatccctgggaaagctatccagacaagcactactagatctggcatttatatggcttgacgatcgcaacatcgcctcatttccaccatacctacagactgacgaaaaagatggccccgacgatgacgaagccctcccctaccccgcggaggagacaatcgaacaagtccgccaagtatatgaagatcttcaggaccgaaagggcgcaaagcgcgaagtgctcgaacgaattctggaaggcgattggcggcatggaatcacactacgccagctggccatggcagacctccgctatatggacgatcaccccgccagccttcgatggaccgcactcgagctcagtcgcattgatacaaagcgcaaggtctccaagaaactaccgccaactgactggtccagttctgtaccgcgcatgcaaggggcaacatttgtgcaaggcctccagcgagaaatctccccattggtcaaggctcactatcacctcgcccactcggcaacattgccgctgacattcttacgtatctttgtccttgactcgccatatcaatctcctaggcaggcagccgacgtctttactgattcgtcccgagtcatctatgtcgctttcccggatagttgcccctacgtctacacttctatagcagcatccaccggatcaaagtctgctccttcgacaagctcggtggctactgatactcgaactctccagcgcctggtgcgtgattccattcccaaagctctatctcgtccgcaggaacgattctctctgcaagcgacatcactggcagcaaagaatctgcccacactcttagcccttcgcggaccgggacgatcaacggcgtcaaatggcgcctttagcatatttgcagacgcagctattgaaggaagtcctttggaccctcgaccctccaatacagtctcacctgaagagcatatccgagcgggtcattctagtctagcagaaggcaaagaaaataccgatggcttatcgaccaaacgaagatccagcggtgttgatacaggtcccctctctccggattcgaagaaacgtcgtctggccatcgattcccgattcggaacattggggtcatcactcgcccaggcaccgctggaccgtcttgatatccggctgcttgacaaaccaggctccagtgaacagcaggatgatgatattgacgactctacgtccacgcccgccgtgtcactcactttctccggctccgacgtcatcgccgggattcgcaaacttgctgagctaggcatcgttaaccctgagcgtatgccgtcgtggatgactggagaggaaggtgttagtgttgcgactgttcgactaggccaacgacttcaaaagggtatataaatgatttttttttggtgtttggattttggggagttgagaagcttggtccttctttgtttcttcggccattagggcttgatgtgatacccggacttcatatgaatgatcattttgttgcttttttatcacgtagaagacgtcctaaccgagtatagtagcgagtgaatgtagtctacacttcacatgcaaaattgtaaacatggcattcaattcatgtatccagcattaaaaagtccacctccttccagaaccttggggcacatttgcaaattcacaagataagtattcctccgatcgtataattataattgctcgccatcagagatcattggatatccgacatagctaatgtgactagtctgccattgtcctcaacgtggatatcgcaatcctttaatatgatatagtaattatctatatccacttcgacatcaccaattaggtattgctgatcgagagtcgatactggcgtcacaaccaagaccgatatacttcccggcgtcgtatttgcggtcctttgacgcatcagcgcgtatggccataagggcatcagtcgcagcattgcccttggcatcatgcgtatcgacaatagaccatgagctgctcagtaaatcccgtgacgtcatcttcctcccgattgttagccatatactccgtatattgtactcggccattatagccatggatccagcctcctcatcagtgacagccgagctttctccgacactggcagatcctggtgcctaaatagttaacctatgcaccaaatagtaatacgtagaaagtctcgaggtcgtgggtggacacacctatttgggaaagagcggctgtttgcactgtttgtttggggaagcttccctatcgctatcagctcgtggagaagaagtggactgtcttcatcaacaagatgaggctatactgcaacgcctgccattgcagttaattctttacccctttacttcttcgccctagagctgatatctgaacttattctctatgtcacgtccacgggctctgtcgggcgctgatgccccaaaggagccacatggggtctccctcaaaggtatgtaaatacaactcgaccgatagttggaccagcaagctaattatgaattgatcagtgttacggtacgttaaatcatccatattcgttgtgtcgatgccagcctctaactcttaatacgcagccttgcgcggccgtcgctttcctatcagcatcccctcccgacgtctaactctataatctccacgaaagcctcactaagctatccgtccggtgactccgatgatcaatttattttagcgcctcttgtgagacggtgaccaagcgccccaaggaaaccgtttactaacggcaatagcttactctacctccctccttcggatccgtctacgtcggagagacgttcggatgcacacttagcgcgaataatgagattcacgatgacgacaacgagagactcctcacatccgtgcgcatagtagcggaaatgcaaacaccttcgtcagtggcggcactggagctggagccgcccaacgactccgcatcaacagacggtctgaagataggcgagtcattacaaaagattgtacggtttgacttgaaggaagaaggaaatcacatactggctgtcagtgtcagctacacagagacgaagatgggctccgactcgcaagcagctagtggccgggtcaggaccttccgaaagttataccagtttgtggcacagccctgtttgagcgttcggaccaaggcgtccgaacttccgccgctcgagataaataataaatcactcggtccgtacgggaaaacgaggttgctccggtttgccctggaggcacaattggaaaacgtgggcgagggcgcggtgatagtcaaggtatgaattccccattaatcctctgcgaatgactgggttttccacgccgaaacgcggctgtacctgaaaatccggctgggccggaatgcaatgctcaacaatttggctaacgttgggggatggacagcaaacgaaactaaatcccaagccacctttccaatcaaaatcgttgaattggaacacaatgagcccagacatgtcaccctcgtctctgcctacactcaatccacgggatgttctacaggtagcatttttggtggaacaggaagagggccagaccgagggacttgaaatcctccagaaggacatgcgacgggacggtcgtgccacgctgggtcagttgtcgattgaatggcgcggcgctatgggggacaaggggttcctgacgacgggaaacctgatgagccggaaacgcacttgaaacgcggtgtgcaaccaacccatcggattatttccgccactccgccctgcatcatgatatggacgccgattgcattatgtagtgcatccagccgctggattgcatgagggcgcagcaagggcggtttgttcatatttccaatggcccacttatataatattacctttgcattggaagcagttgaaatgtcctgaattgggtgtacagtgtaatatgtcggccgtttaatataccatacaatctatgtaggcctcaccgagcaatgcctgaggctctgggatagagccgatgcgttgccgagctctctggcgccactagcacggagcggaaaccagccttgccatgcagccgacgcttaatctttgtcacacagcagccgcctttcggcaagggagctccggtgctagacactcgtctaatttggccgcccatttgctactccttgtagggcttcacaaaaaaaaaaacgggcattcgtcctcggcccaaggccacgtattctacgggatgccacatatagaaacagtacttcgggtatgtatacatacacatgtaaggtcttttagagtccagatttatcgatatggagtaggggaatggaagcatctagactctggctgatcaatggggttcagttgtttacataggcctatgttgttgcccgatctcaaagatcattatctgcaatctactccgtatgtctcgcacagacttccacgggttctattttggttttactcacgggcttttacctataaatgattttcgtcatttttttaggttgtcaatactaccttgatctgctccaccgcctcttccaacattgagtcgtattgctggctgcattaagtgcatacaaggcttgatgtacgctgacaggagtcggagtgaataaccttgcccgaaacactgggatgcaaccagttgaaaagggctatcggctgggggagcccatgtgtcacgtaacgcgggtatgggccgtgttcagggacttacaacataaatagatatgtatttcggtacactatactccgtatggattaggtctattggacttgactatggacttagtgtttgcttatattgtacttgtccacagatggtacttggatatctaattatgagagatatacatagtaatagagatgcttggcagacccaggggaatactgacaccggaacgaactgcgattaacccacatactatccatatttttatcaattggatactgtggaaactgatatacatacaacatcttccgcacttaagcgatactttctttcacccctcgatgctccacagtgtccaactgtagtattgatcatctccccgggacaagccactccacttgatgactcctgactcgaaatcctatgtcccaaagtacacatcgtgtcatgcatagaaagtacggaataagagaaacggtgggaaacgtactccgtacatgatactagttgtaggtgtggcaaaaaaataaaaataaagaagccgttgggtggactccgcaatctaaaagcacgagggaataaacggtaaagtgaaaacctacaatctcccaagaccgcggcagttcccgatggttttcaccccctgaaagtgctagttagcagtttataaaagttagatatacaaaagaatgacattgtggcgctataccaagcaaaaaacccctaaaacccctaaaaagaaagacatgttgacgccatgtttcaatagagaataaaccccagttaccccccatagatagcgtactagttagttgacgaacctggttaaaaaaaggatcagccaagacccgcttgcgttatccgctaaagctcaaccatggatcacgggcctctaacccctggggcggatgcaatatttccaaggttcgtggttctttatatcttgtaattggaagttgcctggtatctatacacaacggtaggtatcattcgggaaagaagtggaggagtaccgagggcatacatcgctgttgatatagacataagaatgaaccggtattctgggtataccccggaagtctggatcccctttagagtctagccaccctgcacatgcctgcaggtcgttacggtgtcaagactcttgtgcatggaggctagggctgtgaatggcccgggcccttgatgggcttgatttgttaaatatctggacttgacacgggtgactcttaccatttttatacagtggagtagagatgtgcatttcgaaagtcgggttctagtaacattactacacgcctacgcaaccacccgtgatcctagggggaagaagaaaagaaagtttttttttttaaaaaaaaacaacaacaacacaggaatattccaaaaggtagaaaatatatgtatttaggtagaaataatacctggaggccacaaataaaaaaaaagctaatcagaatcgaactcctttttaatacaacgttggaccttcaaaccaccccgaaattgatcttcgctctgaactgcccctccctcccgttctcccccatttttaccagcttccccctcccgaacactacatgcgctcaattcccctgcgcattcctttccctggaaatactacgatccatgtggtgacaattaaggtattaacccgctacagtccgtcgcgactctctccacaatgccaccgcctccaagcaccccggaaggcgcccccctcgccgactacttctggatagccggtgtcgatggtgcagagatcctggacacttttcagagattgggagaagattaccgtgccaacggcaccgcatcaccaggccctgcgctcgcagacaccattcaggaggacgccgatgcggaggaggaacacaacccggatgggtttacccgaccaaactcgacgctcttcaccggtgtcagtcacaggggctcttctcaacgactatcaacactttcgaagaactcagagggagcaaatggggctggcagtaacagtaaccgaagcagcatgaccgtcaagggtggctcgtcgcccctgcgtgccccaaatctgttctctgaggacttcgatttcgactccgcgctgtacaagttcgccaacgagcgggaatcttttctaaccgacttgagcttgagcgctggcgctattaccccgaatacccgcccgcgatccagggttcgcacgcagaagatcgtctccgaggattcgccctcggctggcggtaacttgctgaggtcgggtattgggagcgtgcgacgatcctttcgtgatatgaatagtatgaagcggcagccgtcgattgctcgtcagggtgagagccctccttcaaccctatttcctgttcactctaaaacggggtcgtggccgggactttctgtggatacactagctaacaatggatcgtcttcagcttcggtgcgaacttctcggcgacttagcaactacaactcggtaattcctgtcccgcaacccctcgagatatcccccacaatgcacccgttgaaacgacgattcgagcccgttctcctcgaccgataccctacacgcggcatgccggacgagatgaagctgcgcggcaatttccccgactacgttcctatgttcgcctttccgaatgatgtcaatatcgtctcctccgatcagcgaccgcgctctacctggcacggattcgccatgacaacagacaatggctccaggctgcacgccatctgtgtgcttgtctggatacccctcaacccaaatgctgcagaggagctcgagaagcgctgcgaagaatggcgaagggacaacatgacagacgaagagcgtgagctggctgcgagcttaggtgaacggttggcatcagagcgggccaaattatcccggctcctagctcagctgccgactgtccagtcagggtcagaatcccgcgaacagctcgaagatgatatcagcgctgtggaggagaaaattgggctaatgaccgatcttcttcgtccggtccggcacggcgcagcttctaagatcgagggtctgaccgatggtgatactgggttctggattccccgtgcgtacggtatcttgggccgagagagcacgatgacgagcttctggaaggaatggctcaaggccgtcgtggtgccaatgacggaaagcagtgtacagcacgtgcctccaccctcgccgcgcatgggtgtatggcagccattagagcgatatgtgatgaatctctgcacagaagcgttctgtccaatatcttcgaagactcaggtcgagattgcgattcgtgagctgcggttgtttgcacgcaaagaggcacccaatgagatcccaggttcccggaatgtatgtgcaccacaatcttgatggagttctctgtgggaatttcgctaactgatttctagaccgatctctatgccttgttccgaactttgtcggttccaaatattatcattctctttgaggtaggcttgatttgccagttcagttgacaagacactgctaacaactcacagtacgctcttactgaatcccgtatcatattcttgtcttcccacacctccatgctctatctcgcgaccagagcgttggtcgatcttttgttccctctggaatggacaggcgttctcattcccgtccttcccgcacgcttaatccaggctctcgaggccccttgcccatacatcgtgggtatcgagcgtcggtatgagaaggtggagctgccgacggacgactttgtcctggttgatttggacaacaatatgatcgaaagcaccatccaaccgacttctcttcctcgtcatcagcgcaggaagctcctctctttgttgcaactagctgcccctcagcacggtcgatgccacgtccctaccgggcctcctgcatatgcaatcgagacatacccatgggactcgttcatgtcagagagcaaggccactttcacatccaaagcgcccgcaactaacctcgcgaaatatgtcggtctgaactccagtgcattcggtgcatcggccgtgacgccaggctcttatacacctcccatctttaacgtcttcctccacgcccgagccgagggtggcccctctcgtgggtactcatctcgcggtactgagcgcccagggaccagctccactctgagagtaagtgcctctccgccgtccccgagagagaattcacccacctctggcttcttccctcctccaacttcctcgtcgcgcaatgattccggtatggcgttgcaagcttcattgcgcgagaagcgttctggccatttcgatgccgcctcacgccgaagctcgtcgtttggaatgggtcgacgtccaagtgctccgttcctcggtcatgcttcgaatctctcattgagcactctcaatactgactacggagccggatccacatatgcgccatctgtgtatgcgcagtctaccatcgctgcgtccacgattgtccctcaatccacataccaacccgttggcaataacgagggcacttgctgggctgaaggtcactatttccaagtccaaccctgggatgacaagttgacatgtgctatctgtgatgaactggccgaggaaaatatgtacaagtgctctgcatgcagactgacagtccacaaccgctgcgcgtccatggtgtgtctgccgtgtgatgctgccttccatccggatcagattcgcgcggcgtttgtcagatgctttgccagcttgttctacacgtataagaagttcctggtgcctgccagtggcgataagaagaagtccggtatgttttacaattttaacatggacgctttcatgaagagccttccaagtgagcacgccgagtatatcgcaattctacagcagacacaaggtaagtccacgaattctgctatcgtaccatggaggtaatattgacccagtactaggattcaacgagttcattagtgaccgtgagcgaacaaacccgaaaaccaaggatccgcgcatgaccctgttcgacgaaattgttctttcgaagcgtaaccgcggccgcacatccatcttctccggccgttccacaacagacttcctctctgacacctcgaaccatatatggcgtacagccaacgctaccttcttccccccaagcagccgcagccagcagaatatttcatccgactacggtagaggagttcgcacaagaggtacgcaacgctccaacacccaatctgattctcccactgacaatctccctgcagcaccggcaaatctagatcctagcctgatgacagaaccccgcatgatccacggtgcgccacgggtttccaagacggcaaatactgctcgtagaaagccgttgcctaaactgatgaacgggctcgccgtctctccgcccagttaattggtgtgatttccacacgcgagtgacccgtccatcatctcgtcgatatctgccctgcccttgtgcgggtgggtcctttgtgcgcgggcaaagtgcaatgtccgcctttttgaaacacttccctctgtttccttgcgcaaccctgaaacctgaaactcctcccgattccggctcggacttcgatttccggatggtggcgctgcgcagtccatgctttatctcacgacaagcaaataggatggcagttcctgctgcgtgtcttcgtttgggcagtgtgccatccaagctgagaatgacaggccgctggctcggctctactccttgcttaccgatattaccccgcaaatggaactgcatgtggttgcacgcctttagcctctctcccgcttgaacttgcttcccttatctgacctaccatgccttatcgtggtagaaccgacgtctggaaagatgtcaaacaaaccacgtgccgatcctcagttgcgttgctgtcttcgtacatagtgttgactccggcttgatgcacggagccatgaccaaatcccctaaaagcgccatcccggattgcaaagcgatgtggtgattatttgtgtgcctgatattgattgatacatacacgtttattctctgaaccaatacctcactctgcttctcttgcccttccccctcttatctctcggcctgcgtttctatcttttccttcctgttactacccaataccccctcttgatttggctggtattttctctccttctgtcttaattggttgtcttaagtacaagctgggtggatctagtctcgatttctgttttttccatatttctcgtcatttcggtgtcaatcatacctatgctacgtggttcacgactatccttcgggtatattttcctttcagatctgatttgacactgtgacttaattttggttgctttccttgcatcaaggacagaaagaagaaggaacaatacatagatggttgttgtaccgtgcatgttgcgaatataaaactatctcatctttgggtttgcgctttgtacaagtatccatgcactcttccaccaatcccgatgtctgattcattgtttatctgtctgcctcggatataataggctatgtaaaggctgagcactcgctctcccgagtctgaggccttggatcggtggttttccctcgtatcggatcatggcggtgtagtacagccctgtcagggcatcgtgaggctgtgccggtgccttaagatgtttcataaacgctgatgggaccatacaagttgtagatgcggtaattagcaggatttcttcggcatacaactgctggaacatctcctttccactgcacagaatcccaattaatacatccagatgtagtataattaggcgtcgcgcaagatgattggtggagaaacccaaactccgctcccactttcccccgcattcgcattcgcattcgcattcagccgtcgacctacgtaggattctcttgtcgcgcattgggtggaacctccgcgacgagttcttccatcgatggcgcctcaaatgccgtcctttctgatcgtcgcggctgcgttattggattgacttagcgtccctttagtcgacttgtccccaagttaccccatatattcgagctagcctcgatcggcccgctccctttttcctaattgcgttggaaaaatatcccatgctttaatatactacctgcctattacattacccgggtcctggccgtcgagaagcgaattgcttggtccttgcgctcattcaaccctccccgactcttatttctacccgtcttaacccatgcttcgacctgcacaaatatcctcgccagcaccaagtatgaaacccattgagactgccgtgccatgattccgacagcctttccgcagcacatggccacgccgctgctcgacgatccccctatctctgccgccctaaaagcccaggctcctcctagcgcaaaccccaatatcgccgtcccttttaatgctgcgacaatcgtccctcccgctactatggccaccgagcccgaagaccagacagtcgcgagcattgctgcgccggccgccgctactgccgtgaggactgtcgtgatcatctacggccagaatcaagagcatattgtacaactggttgcggaaattctgggcaagccatggacaacagatgagtcgcttgggatgcttgcgcgagccagcaatgcattggtagtgggaatcttagcgcacgatctagcgcggagcttacaaggatgcgagcgatcatctctggtcctggtaaacacgtactgcgtggaagacgggtctgcgccggaagacgcgctcaccgagagctgtgactatgagttcttatattcgcggagtccgttcctgcgccgggacctggcgcgatttttgtctttgatccttggccagacgaggccgcatgatgatttgcggaccaagactaggacgaattttatctcgactacttttccggatgtgcatgctgctttgccgaatttggatatcctgtctgtggggtcggatgctgttgagatccgtgtggatttgctggttgaacctgtgccggagggctcgaccgctccgctagttccaagtttgaagtatgttggtcagcagttgatgcttttgcggcagcataccgagttaccgattatctttactgttcgttgtacgagggagaatggaaagttcccggtagatgaccctgcgctctgttacagatacctgcggcgcgcgatacaatggggagttgagtatatcgatgtggaagtgtggctaccggaggatatacggcgccagctgttcgaagcaaagggccatagtatgattttatctgcgttccatgacatgtccgggacctggaaatggacatccgaagaggcacagcgcatatttacggaaagcgccaaatacgccgacatcgtgaagatgatcgccatggtccacacaatcgaggagaactatgaactagaatacttccgctccaccatcaaaagccgaggctcagggccacctctgtcagcagtcaacatgggccaaatgggtcagctatctcgagctctcaacaccgtcttctctccaatcacccaccccctcctcccaatgatcgccgccccgggccaactaacggcagcggagatcaacgaggccttacacatcatgggccaactccccaaacgcgagctctacgccatcggctcattccgctcaacgccacattcaatgttcatggagaaatgtataaacgagctcggcctcccgcacaacttcacctcagtcgacctaggcccaaagggctccatggaatccgtcctcctacaaccgcacttcggcggcgcctacgtcaacccccccgtcccaaccacaactagtttcatccctgcagtcagcgacgcagcccgcgcaattggattagtcgacacaatcgctatgacacccgacgagactgctgtaggaacgtgccgattaattggcgaaaacgccgcctggaaaggcatccgcgctaccctgacgcgcgaatacgtgccgtccgcttacagcggccgggcggcgataatcctcgccagctcacaagcagacgcttcagcggcgattttcgcgctacgcagtctggccgttggcgcaatctacacagtcgggtttaaagcgagtggcccgctcgcggcgggtctggagccgttcacgtccatccagtccgtgaaacgggtcgagcagccctttgttattgtctctgcgctgccgccggagaaatcgctgctcgtgcagcctttgctgagacattatggtgttaatggtcgttcgtcgccgccttctactcgtgggaaggtttatcttgatcttacgagtgggacaagaaagggggatcctttggctgttgctactagtgctggatggacggcgtatggagttgaagatgttagtgcttggactaccgttgagacgcttaggttgcttgttgggcaaaatgtgccgtttgacttcgtgcgcatggcgtctgggagacctctgttctagtcatatatattataccgcatacctacgtaggtgatttgtagttctgtttcattgtttgttgatgccatgactgctaacgaccagacatatatatagatgctgaaagataagaacttatcagaaaatccggggtcgacccctcaacccctcatttcctccttccaaggttaccccaagctttggttctctctacctctatgcatatttccttctagattcatcgaaacaaacagaaaatgcatctgcgtcctgatcatgcagtccgagacctcccaaccctccacgcctttatcgaacaacacccacttggcgtcctcaccacttcgctcccttcagagaatcatcccacactccaatgcagccacatcccctgggtgttggacagtgaagcagccctcgaacccgagttaccgaaggaaacaaccctcgaatctgagttagcaaaggaagcaagagtacccgatggcagcacttccgcaccgccatatccctccctgggagttctccgcggccacatcgcgcgccaaaacccgcaaagcaaagcgatggtaaaatctgccttggaatatagcaccaaaacaaccagtatccccggcgcatttcctataaccaattatgcagaagaaccaccgacatcaactagctacactctccctgatgaggtcttagtcgtctttaccagcccagtagaccactacatcacgccgaacttctacacagagtccaaacccgccacgggcagggtcgctccgacgtggaattacgccgcggtgcaagtctacgggcgggcgactatttatcacgatgcagaagacgaacaaacagagctgttcctacgacaacagctgggtgatttagcccggcttggagaggaaggggtaatggggtttcaggatgagtctgggtttggttcgggttcgggttcgggacctgatgtcaaacacggaggtggtgaaaccgaaactgggaatggggatgaggagggggacccaccccaggaccagaaccaaaaccaaaaccagggacagcgccaaaacctgatccctgatatgcagctgaatcaggggtcgaagacggccaccggggctggcgggcatggcgacatcatgccattgccgaggtcgacgtcagcaccttggaaaatcgccgatgcgccactggactacattgctgcgcttttgaagaatattgtcggcatgaggattgaaatcacccggattgagggtcggtttaaggttagccaggaacggccgcttaatgatcgtgggggtgttgttcatgggttagagagcatgggtgggagagcaaaggatatggcggactttgtgaggagagggaaggtcttgcctgggcaatgatggcattaagctttttgtgtgtatagatcctaggcccttcgagcacgaagtatccgcagtacgtagactaatagtgccaagctcgcgaccacgtacggagtgcagcccctactccgtagtgttggcggcccgggcttggcatgattactcaacataaaatggtctgtgtagaagcgcaaactcctcggaaagttaaaaaaagaccaggatggagattccgtctcgaatacagtagctgcagtggatgatcagggatcggacgcgtcttaatcagaaggtgtaataagcgggggccaatagtagtcctgtaacagccaccttcatagaccgtaccttttgcacatacctcgaatagttctgcaggaaacacgggtaaaatgaagggtcttaggggtctagatggcaactgagaacccccgtggtgggatggtggacagacgatagctattgactggctagatacaatcaagctactgcaattacgtgcaattatggggtatctggatcatctcggatgctggcggcgaagccctaaagcgggtggcattccataaaggggaaccatcccccgtctatacagattaaaggggactgaaaccagttctgggttgaatgggatgttagaagtagagtgagtcgagaataagaacgaacataacagctacatatcttcattgtacatatatatcatcttctagcctaaactatggaataaatacaaaaatctcctctccccccccatgtcagcccgaactggggaattccggcggcacatcacttctccgcatttcttcctctccgcaacctgatcatggtataggatttcccttttttcctaaacgccacagccatgcgcctgacctcttgtccatcttggccgcggccgtcttctttcttcttttcttatctctcttccatgtagaagtgccatgtctcgtcctcaggtcagcatcgaccgtctcacgccccgccgtgcgacggttgagccgcgcgaaaccatgaattgcaaatcctgtcgcaagcgcaaggtacgtctactcagtgctagtgcgattggctctgtctaacttgttatagatcaaatgtaatcgtatgcgaccgagctgcgaggcatgtaaggtcttccagtgcccatgtctttatggtgagtcaatcatgtcccctctatatcaaacgactcctctgttaaccttgttatgttcaagatgccgttcccaaaaaacggggccccaaaacagatgtgctagaagctcttctcaagcgggtcgatgggttggagaaacgcctccacgacgaaaagaaccccatctcgcccacttctcccgataccgcagatgatcagccgagctttcctgcccgtcgcaacaccgtcgacgcttcttttaatatttactcttcgagcgatcgatcggctctgccaacttctctcccccaacatgtggatcccttcattaggccaaccggccacccagcaggtcttctgcaacagccctctccgacaaacaatggtccactatcggatgcgaccctggatctttacttcgagcgactgcacggcaagccattttatatattagacgaggcaacaacgcggcagctccatcaactgaaccaattacctccgtgtttggccatggccatctcagcaatgacagtaaggtaaaaccaccaagcttccaagcgctgtcacatagcttacatgtttgactgacgaatcttagatatacaacctcgcctggtcaagtggaacagtcactacgttccgggctcgatgcggcgctacaagcaagacgtatgattgaagtcgacgatcctacagtagaaggactacagactctattgttactttcgcaagctttccacgcctatggtcttggaaagaaagcttatatgacattttgtatgcttggcctcgatcctccatggtggaatgaatttgactaatgatgctagcaaattgtgttgccatgatcgtcgcgctggatttgtatcgggaggctccctccaagcccaatatttcgcctgccgagcgagaaatgaggcgtcggctattctggtctgtttacttgatggacagattcattagctgtggatcgcgacgtccatgtctaatcaccgatcattcggttgttctgcgcctaccgtcttgggcaccacatgcagccggtctgaacatggagggagagctcttccatgtcggtccgaacattcaatattcttctgattcccggcgcaaatcaccaagtgctgcctctttgctgattgatatcacgcgtattcttggtgtcacgaataagtatctggcagctggcggagtgaaaggcgactctcacttcccatggcatgcgctttctaatctatctaagatccgacaagaattagatatatgggccgctggtacgcaggacgtctttgcgtctatcgactcattgttcggccaccctgagagtacaacacttttgctgagcaagttgatctaccatttggtgcactgtttgatctatcgcccgttcttacccattgacctggtagagctccggggtacagggcagcatcagtcctggcaaattgaggccacgaacttgtgtttttcgcactccaatgccatcgcagagctcgttgaactgggtcgcaactccccgctaatcgagtggcctgctttcgtcgcatactgtgtgttcacagcagggaccgtgcatgttcacggtgtgcactacaagggccgcgaaggagaggttttctcttctagcgctgaattcctgactcgggagatgcaccagcttgcttggctgcgtaatatttggactggcgtccagcatcagcgtgagctgctccagactatctatacgtgtcactccgaattagtacgcaatcttgccagtagcccaatgcggttttcgccagtcttccacctcgaacacttcctcgaccgatatcctggtctggcgttagatggatcacatgttcggcttatagatgcaggggatgatctagctccaaggtaggtcctgctggttcgttttttgcatacatattatatgatcctaactccgaagacagtgctgcgagcttcattgatcaccaggatcactactaccaacgaccaatcgccacaccctcatatcacaatccttcaccctacttctcaaatacccggcctgggccctcgagtccgttaccatccagccaggcctcagatatcgaccgtcgcaactcccattcccattctctatctcagaagccatcccacccaacttctctctcgcccagtattcaattccacacgatccaaggcaatcaacagcaacaatcatcatctgtcttctccctcccagccggaacagacctatccggtcccggcacatcagagaacacccacctctcgatcccgggattctccccctcgtcctttggactctccccaccagcctacctcaccgacgcttccatgcacatagcaccaacacccccaaacccgcaatacgcaaccttcccattcgacaccactcacgcaaatccgaacggaatgacgcaagcaggtcccaccgccctgaccccaggcggccagtcccacactagtggcactcacaccacagccggcagcgaaaacacatctgaaaaagacccttttctgcgcttgctagaacagctggctgagaatgagaactcgcagggcgggcctagtgagcttgagttctttctgacaggtaccggtgccgaaggtgatacagctattcctcttgagaaagatagtgcttcgtagtaggcggaaattggtttgggaatgataattccctcatatatattctcattctgtgtatatccttcgttgcatagcttgtttgcatgtaggctatggccgagttgactgatacccattgtgtttattgtttctagctacctagttactatgtgagatctgagtcaatctatcatataaccttggaatgctcctattagagctagacagaatctcattactaattttcattgttcacccggcatctgtgctcttcgcccggagttaccccggtctcggcggagctcccccccggaacnnnnnnnnnnnnnnnnnnnnnnnnnnnnnnnnnnnnnnnnnnnnnnnnnnnnnnnnnnnnnnnnnnnnnnnnnnnnnnnnnnnnnnnnnnnnnnnnnnnnnnnnnnnnnnnnnnnnnnnggagctccgccgaggaaccccgcgttgtaaccgatttgtcactcctctcctctcccataagatccttgaccatccccttcttaatgtcacccatccagcgtctcaaaccaatccaacgccttaaatctataacaagtcacctccaacaaacctccaaaatgaaactcctctacccaacctccctctacattgacgcgaagtccctagaaggcttctccgtcgaattgcatccctacgacgtcacagtcccaattcccgaatccctaatcgacgccgagttcctagtaacatgggccaacaaagccacgaacctccgcgacgcagcctcccgcatgaagaacctccgctggatccagtcgctagcagccggaccaaacgacgtcctcggtgcgggcttcgacgcctcccgaatcgctatcacaaccggctccggcctgcatgacgagacagtcgccgaacacaccctcggcctgctacttaatgctgcccgccgcttctatgaaatgcgcgactaccagaaccgcggcgagtggcccgcccacctgggcggcccccagcccgatcgcgcccccggcacgttccgcaccctcaagggtgctaatattaccatctggggattcggaaatatcgccaagtctctctcgcccgtgctgaccgcgctcggggctaatgtcaccggtgttgcgcggagtactggtgtgcggaatgggttcgaggttgttgcggaggatcgcttgcaggagattctccccaagactgatgcgcttgttatgattctgcctggatcggcgagtaccaatggtgcgcttaatgctgagcgcttggctttgctgccgagtcatgcttgggttgttaatgttggccggggaacttccgttgatgaggatgcgctgcttgcggcgcttgaaaagggcagcattggcggcgcggcgctggatgttttctccgttgagccgctcccgaaggagtctaagctttatgccgcgcctaatcttattctttcgcctcatgctgccggtggacgtccgcgtggggctgaggcgcttattgcgtttaacctgagacggcagcttgctgggcaggagctgaagaatattatttgagcttgatgtggagatggctgtggaggtttcttgatagattttatgagtacatttacgaagagggttagacgccatgctttgcgttggtcttgttttgattacaaggaactctagaaagacaattacagccgaattacacaatcatttgagaactcagaacataagtgtgatcaaaattaatttgatataaacaaagagggaagactatatacaatttactatatacaacaaagcacaccaaaagaccctatttttcaaaacaccgtatcgtaaatgccatcactgtgtcacctctcagatgcggggtttactgggggcacagcatgaagaagggaacgcattcttcgactgggtatcaacacaaatagcagaaggaggcacccagagggcagggttcttctcgaagaagtttgacgcacgcagcataatgctaaccggctcagcaggcatgatggggaaatcctcagttcgcgggaaatgcgtcagaccgaactgcaggtagcagacgatatcggtgttctcgatgttctcgtcgcgcttcgcccagtcggcgatggtcgagttgaaggggtgtccctcggagccgtcagactggcagacgtagtcaccagcggggaagagctcgtagtccttgtaaggagtaacccagaggggcttgcgggcgaaggcggcacgcttccagacggtgctgccgggcttggcgagcataggggggcagttgttgttgaggatcttgtaagcaacgggctttttcgcaatggcatgaatgcggttcgggttaatgatgtcccatgatcggttggtctcgtagcagtagtctgcggcaccctcgagggatgtgcggaggggagtcttcttgctgtagaatccgttaccgtaggggttctctggggagccgacggcggcttcggcggagacggcgtcgttctggacgacggagttgttttggccgtcaatttcggggtcgatgcggagggagaacaagtgctggtggttgtgggcgttgatggagggggcaacttctgtgccgaagggagcggcggtttcggtcgggtgcatgcagtaggtgttcagcataccggtgagcttaatctccagcttgtaggtaccatccagggtgaagatgtggtagaagccgtattcgtagttggcagcggtgatgatttgggacacgatgagcttgcggtcacgagcggagatcactgtgccatcacggtagtcggtgtgcttgtagaggaggccgttgtcttcctcgtgaatgcagatagcgttcttgacaacggcggcctcacccttggaagtggacatgataccatccatgtagtggatgacacccttgcaatcacaacccagctttagggagttggtcatcaggccagtgccgtactcgccgacatcgaatgcatgcttcttgtggtggggcttctcggggcagccgtaggggacaaccatctcaacgacggagatacggttgaagagagtacgctcgcggtcctcgtacatgtcgtgggtgcgcacgtcggaaatgacaataccttcacggtagttgaagccaatgtgcatcttgaagttggcccaggacagctcattgccgcggaccttgaaagagacaccctcgggctgggagatatcgatgggcttgaggcgatcgtggttgtacttgtcgctgatatattcggggaggtagttgtgctccttgagaggggcagcggtccgctcgccgttgacgtaacgaatgtcaacgctgagaacctcctcggtgtcggtgtcggcgacaacgctgaaatccagagggtgggcatattggttatcgaactcggcgttgcggtagtaagccagaccctgctggaggcggtggtcgtatccccagcgctcgtcgatgccgatagcccatgcgtcaaagaagaccttgctcatgtcggtaattccaatgtcattgcaggcccggataacgcgagcgtccttgcgagcaacacgctccatcacatcaagatcctctagggtgagggtaggcatgacatcgtgaacgtccttccattcctcaaccttgccggtggcgagatttgccaccacctctgcgatcgtgttggtttcggggacaaagacaatggcgaaggcacgacgggcaggagcggggacggcgccagcgcggaatgcccggtattctgctttgataggttcacggagtgtgatgcagttgaacttgacaaacttggggttggcgtattcccggatgatctttgccgcttcgggaatttccttgatagacagttgatctagggttttgagttagcggagctctcggattttacacagaggacatagcatacctaacggatgaggagtgccttttggcagcatggcagcggcggcaacactttcataatccccgtcgcggaagattgtgtagccaggaattgactcggtatcaggagcagacgccatgatgaagatgtgaaaggggtatcaaggggaaggagagagttgtaattgtagaaaaaccagaagttccattccaaagctgcgatagaccttatatagctaatcgaccttgaacgtctgatcgaatttcgccgcatgtaccttcctaatcgggcaatcaagaaatatatctataacctaagcagctccgacaaagggagcgaatggtcccgagagtgggtactctggccgttgctcaatttgggttaaagtctggagaagatgtgtctttgcacagcatgtgtccgagactttaattctatgccataatatgctttgcgtaaagtgtttgccatcgaaattatcagccaatcgcaatgcaacggctcggagcgatgtgttggccacagcctttcgctagtggttgacctaataaagcaagtcttctgagaaagactgtgcatgggcactagaggaaaaacctagcccaatttgacaatatctgatctcttagacgaattaggggagcatgcgactggcagggttggtgatgccaaggcgttaaatcaagcttattttcacgtggtcttgatgacataatgtaagccgcatccctagcctggggcagcccatcaaagccgttctatcacacatgaccccccctgttttactgtgtcgtagaaatgatcaatatccccattacatatggaaacggacgagcaactcgttgaccatatctttaacctaaacacatgagacagcctttgggtggacttgcctgttttgggttagcggctcttgctatcagtgactggggactcgtcaatccacgtctatccacatcaagaaacaccccactccccaccgttttgaacctcagaaatctggagctcggcctttttttaggtggagtcgataaatgtatcccgataagctacccagaatggcatgtccatgcgaagcaattgtcgcaaattacatagagcttgaagaaatagttacaaattcatctcctctagcttcactgtcttctccaaacaacatcgcgaagtacatataatcatggccgacttatctgttcagctcacagcccccaacggccacacttggatccagcccaccggcttgttcattaacaaccagtgggtcaagtcttcgaatggcgagaagattgctagcattaatcccacgtgcgtgagaaattaaaaactaagtgtccatgtcttaattccctaactgactggcgatcgaacagaaccgcaaaggaaatcacatcaatccacgcagcttccgccgaagatgtcgacaaggccgtcaaggcagcgcgcgccgctctgaataacccctgttggcgcgacctacccggttctgatcgtggcaagctgatgagccgcctggcgcagcttatcgaggataatcgcactacgctcgccactattgagacaatcgacaatggaaagccgtattccacttcgttcaatgacgacctgaacgagaccgccgagacccttcgttactatgcaggatacgccgacaaggtctttggtcaagttatcgatacaacaccggataagttcgcctacaccgtacgggagcccgttggtgtctgtggccaaattatcccgtaagttctgagatcagtcatcaaacaccatcgaagtcaattgctaactatggcgctaaagatggaacttccctctcgccatggccgcctggaagctcggcccggccctcgcctgcggaaacacagtcattctgaagccagcggagcaaacccctctctcagtcctcttccttgccaacctgatcgtggaagcaggcttccctcccggtgtggtgaacattgttaacggacttggcgccgtcaccggagccgcactcgcctcgcacatggacgtggacaagatcgccttcacaggcagcacggcgacagctaagcaaattatgaagatggccagcgggaacttgaagaatatcaccctagagacgggtggtaagagcccgctgattgttttcaacgatgcggatctcgagcaggcggttgaatgggcccatctcggcatcatgtataaccagggccagatctgcacagccacatcccgcattctggtacagaacgaaatctacgaccgcttcttggatgcatttaaggcgcaggtgaagactgtctccaaggtcggtgatccgttcgaggagtccaccttccagggcccgcaggtgacgcaggctcagtatgaccgcattatgtcttatgttgaggttggcaagtccgagaaggccaccctagtcactggtggtaagcctttcactgttggtgatggtaaaggtttcttcattgagcctactgttttcgccgatgttacgcccgagatgcgtatctaccaagaggaggtctttggacctttcgtggtgatttcccgattcagcgaagagaaggatgcgattgagatggccaatgattctatttatggtcttggaagtgctctgttcacgacaaacttgactcgcgcgcatcgcgtggctaaaaggattgaggctggtatggtctggattaactctagcaatgacagtgattggcgcattccattcggtggcgtcaagcaatctggtattggtcgtgagcttggagaggctggtcttgctgcatactcgaatattaaggccattcatgtgaacatgaagtcgaagctttgagaacaggactcgaagggcttccgaatctggagggaggacacattatattgtacatagcaaaatcgaaacttccatatgacaaaaatggatatctacgcaccttttctatctttcttttcatctggtgctttagttgaacttatctgtgcagagaagagggtcatagaaaaactgattttatgtgaaaagaaggaaatatatttgaacaagttgagcttttagttagaacacgaataaccacatcaaggcgacctcctagcagttactagtggaaaacaaattcattcagggcaaattgataattcaaagagactcgtgatttttgatcgctgagttggattagggcgcttgatgcaacaatatataatggggaaacctctgaatgatgtcaaaaccaagggattcattaggtgtttgcccctcgcgcaggacttcggtccacataaatattcttagatctgagcttctttatacattttatacattctactattcctatattcacaacgtactgtaaggtagatctcgacagctctacggggctcaactcaactggcaacgcatttttctaaactaaatgaaagctgatctatatacgcaaagcatggatgtcaatatatatccaattgacatcccagaaaatccatattttacttgacaaatccgaattcaccaagcgaaccgcatgtccaagaacattcgcaacattggatgaacctcgagcgactcgatccaagaaaacctctcatcgatcttccttttttggctcagggatcggatcattcggaaccgcatgggccatgatgacatgaagattggattcctcggtgttgagataggtgcgacttccctggacgaaccagaacgacacggcgatgacaagcatgacgccaaacacaccaatggcgtaattcatctcatcacctgtgggattaggcgcggtagggaagaaaaagaaaacagtcgtcacactgcaatacacaagggtgacccagtttaccggtgcacccagtctcccaaggttgaactcgccaccaggtgggagtttgtctcggcccatcagcaacagagtcatgacaggaagcccgtatgagatggtcagggcgatggtactaacgctgaggatggcgttcagcactgtctctgcaaacaagaatagaattccaaccagtgctatgagaaatccctggaaccagagtgccctgacgggggcctcccagtaaggactcacttccgataggtaggtgctaaaggggagtccaccatcgcgggcaaagccccaggtgaggcgggatgctgtggtcacgatgctgactgcctggcctaggccgttcatgatgaacaatgcaatcagcactgcgcctccagtctggcccacggtttcttggacgagttccataaacggcaggccgctaggcgagtttaccactgtattgacgtcctgaatacagaagaggcagaccaccatcaatatgaaaccgctcactgctccggtgatcacggcgaggtaaatgactttcggagcgttcttgcgaggtgcagggatctcttccaccaagtgaatcacggcgtcgaaggcagtcaacccatacgcagcctgcactagaccaataaaccagacaacgccatcgggccagccagtttggttgatccatttcccaaacacgaaagaggcgggctggaaggagagaccgtctttcgttccaactgaaataagcagggcaaggcagaacacaaagaatagtccaaagaaccagactccgacaaaattgttcagccacgggaggaatttctccctccgacaacccaccacattgatcaatgtgagagcaaagacacacgcaatataaaccacaaactcaagccaccccttcgacgcaccagtccaggttggactgaacatgaccttcataccgagaaggaaattggtcataaacgccacctgggaggcggccagtgtccaccacccaaagacattgatccaagcacacatgtacgagagaaaacgtccgaagtgtgagtcccagagacggtagatccaataggcctgtccgagggcagtgggcatgctgctacatatctcacccagcgagaaggcgacacaggtgttgcagaatgtaacaagagacagtccccataggattgagacagggccaccgttgatgagaccgtcggagagatcctgtgcaaaggttgaccatgttcccagcacgcagaatgctaacgctagcatgctccagatgttgaatttgcgggcgaggatttgctcgtggccgaattccgcgaggtcgttggcatcttgtgtgtgttggtcggtaggtttgacggttggttcgttttccgcttccatttcgagggacgggagggttcagagcgtgcgagtatcaagaggatttatagagtattcactctaggtatttcccagcaacgtaattgacgccgttgtgagaaagaaggacttgtctccgggctgtagatcgtatactcctcctgaaggcgatattgaaggtccaataatgaggtcactgaagcagttgaatgaaccggatgtcccgtatgcccattcacaaaggttttgttgttttttccgggaatcccatggcgtcggcctccatggccatagaggagggcacgttcactggatattcaccgagtggcccacatgatagatctaagccctgaaggcattttacacgattaaacgacacatacatactgaagatctgtacagagatccagttttgctccagtttttttccaccccacatccgacgaagattgaggaatccctctctggaaggtagatgcggtttgttacgtgcagtgctaattatatcgatggtatttggcgtttgctggatatccgactcgagggatcaccgcggatgttgttctgatacctgattccttgactcacggctatcagatcctcccgaggtcggagttagtcgggttaatgcggctgcattcattgaagcccaacggtcggaaagcctcgatattgtctcttggaattgataattgacttttcgacaagtacaatttcttcatcttcacggcaggactaaaccccggaaattatagaactgtcggcggagaggctgaaaaagacaagcttgtttctcctgcatctgcatggaccttccaaaagcggcaagctcgccttgaaatccggtcgactttgaaactggaccagcttggacttcacagaccatgagaatgagaatcttttttaagaatgcgaggaaactagtgagatatatccctggcagtaacccgggaagcactccctataggagtttagaatgcgctcactgagatctgtgtttggccaatcacagtccgagtatgcgcatagcaccacgcccgcctcctcgcttgcgtgagtatatatgagtgaattgtagttgtaggatttccagggggtttctgtccttgctcttgttttccttcacaacagttctctcagtagcatgccttcgaccgagaagcaaaaggacctctcccggcgtcatcgctctttcaagggatgctggacctgtaagaaaaagaggattcagtgtgacgaagcgcgcccagcctgccaaaaatgcagttcccgaggtctggcttgtgagggatacgagatccgattgcgctggggagctggtatcgcctcccgggggaagtactcgggcgccgagaagcccgtgaaagaatatataccctcgcggtcgaaacgaagattggatatacgagacgagggggacagatgttttcctggagatgaagatcgtcagcctgctgtggtctcgcaacctctgacaaaagaaggtattgctagttcatgatggtctttataattctaaactcacacattcttctagatcaaaatcaattagttgccgaacgagcaacggtcaatatacctaactcatgggaaccgaattctccacgaaactcagctatcaaaaagcactttgagatacctaaatccttagccactttgagtgtaactgctgtggctgtgaatggtcgggatgaagatatatcgagtcaatatgcccagaacgcgggccgacggagtatattggcttgacctgagttttcattcttggttttgtacttgagcactgcaaatcactttttttttatcatgaatttgggactaggtccacagcgaacagactgagacatatgaaattggtattaccatattaaataactatatcctattcatcctcccggatcgtctcagtacctcctttccgccctttttcttgtaaatgatcagtcagctgggaagcttcagatcgatggcctggtcgccgggtatccaaactatcgaaagattcatagaaatgggatgatcggccgctcatcacgttttcaatcgacagtggtgacgacaatgagagtgacgatggacgtcggctgtgggctgctggataggagtactccgaacccgtctcactaggagtctgcggtgagacaggagactgagagcctcgtctcggatcgaggttgggcccacgttcgggttcggacttgggaggtccgtcgtgggcataataggcggtgttgaatgacgttggaagctcaacaggtgatgaatctggtggatgtcaggtttagtactccgcaatatctctttcctatcggggattgaataaagaaagtcattaacataccatgcatctcatatagcgcatctcctccagattcaaccgtgccaggggtcacaggcgagatgagagactctggcacggttgacgcctgcgtcatcgatggttgtgttgtcgacggctgcgttcctgtggtctgcgtcgtccgcgccgtctctaccgtctccataccagtcgatgaagatactggcccaggcccaggtgcggctgggccgctcgcatacatccattccggaggaaggttctgaggttgcgcctcagcagcttcggatttagcctccgaaacctcgtgtttacggtgacggcgacgataaagcaagaatccgacaaggagcgcaattatgagcagacccaagaccgcaccgattactccaccagcccacccggggaatccgctgcccccgctgctttcttgcgcggatgtactggcgctgccaccgctgctggtgctgttgctggtgctggtgctattgtacggccaatatgtctcgacagtcttgccatacttctttccaaaaatccccgctagagagctgttcgtccatgacgatggggcggtaatggttgcacttccattggagctaataagctgtcagccatgatgattgcattatgtactgctgaggtatactcacttgccgcctatcagtgccgtcacaagatctggcactttatacttactccaagtcgtgggatcatattcatcctcaaaggtcaaggtgttgagattgaaattgacaatgataccaccctccaggcaataagttgagtcgacatgctgccctccaaccgctagcatttgatcgggatatactttgatgcattggtgaccgctgcgactgtgtgtgtttgtaccattgtatgccttgacccacttaaaggaaggcagagacaatatatacacgtcgtccgacggattggcgttatagttcagaccatcgtatcccccatagatgtaaatattatgagatgacccatcagccgcactcgcaagcacagagcagaactccgtcagctgtggcggtatatcacccgtcgtgttctggagataccaggctttactctcgacatcgaaaacagaaactgtctccatgaacgtcgggctaatccttttgctctccgccgtccgggttgagtttgctttttcattccggaaaaactcaatgggttcaatcactccgccaatagccactaaaaccccagactcagatataggtacccagaccagttccgcccttgaacgagcaggaatgtagctcggcagtgtgttgtttgtccacttcccatcgctcatcgttgacatgtcaagggtgattaacgtgttggccgtttggttggattgaagctggtttaaagtgaagtcgccccagtccgccgcgcgcatcccactgaagtaaaagcccaagttctcgcttggcgcagatgcggcagcaccattggttatatatcgcgtgacattggtggaaaggtattcttgttgccagttgggtgcccacgagcttctataggcgccatactgatgcgcggcatacgacaggacttggttagaaggcggaggagcagagctatcggtattggggagcatgcctctgtaataaataatctaagcgtcagtggtttcagtgatttattagagagaggagggacccctacccatagagatagaactcgttgtcgttggcaaacatcgttccatcaacataattcggagctatgctagaagcaccgccggcgacagacatgttgctgaggagtttcataaaatccgatgtagtgttgaaagaagtagtgaggttcaggtaataaatggtggcctccaaatctgcagctagttagctatatgcagatatgaagatccatttgattgcgcctactgttatctggctggggctcgacacaaccatcgtcaaatcctctgcagttgttagtgtaaatcagtattgaccgtggggagcctcatacttctgataccatagctcaccgccatcgaggtagattgtatcgcgcagaatattggctacccgtgtcagtaagaagacaactatcggaaagggaaacaagaaatgcttaccacgcagaccttgccagttgcacatggaaacattgatttgagtcgggaatgtactgcatacggccactgcgcagtctatcacgaccagcagcgtcagcagcgtccccaaaaacaagctcatttttcaattgaagctcatcgcggagggtttccaattttcgatgacagatccaacaatggaatcctccaggatttactgcagccatcttgcccaaatggaaaagcgaggaagcggggtctccgaccttgcgatgcgcctttgttgttcatcctctttgttgtcacctgcccccgccctgaatacgagcagccaatgagagaagcaccaaggattaaacgacgtgtagtgcgcccgttcagcttatggccataacgccatgatcattaccatgatcgtattgctgcatgactaggatcatgcactcacggagatacagctgaatcaactggagctgccacattgtgtgctcgagttagcccctgattgcggtccataactccgtgtcgcgggatattttgcatttccttgtaccttgtaccgcgagatcgtcatgactatgctgcactgtccgagtcaatatccaccagagaagaagtctgagcctcgaacgaaatgttgggctttcttttattcaaaaaggggaccgtgcgtgtgttatgtattgggtgtcttcccattctgtcgaggtattttctttgtttagcttgtttaccttgctggccatcgccggaagaatttttcctacagacaagcaaagatgaaggtcgcggtcggtcggttgtcgctgttggcgattgtcttcggtttggtgacatcaagtcacagcagtctcatcaacagagccctcgcgctgccggcggaacaaaaggacgcattgaccgctacaattggagtcggggttacactttggctgggtgatggcgagtcttgcaccgctgaaactgtcacccacactgttacgcagaccggagatgtttctgcagctgccaccaaaatcatcaccgaggctaccacctacactataagtggttgccgaaatgcccacactctgagtgccattcccaatgtcggcattggacccgtggccgttgctgcaaataccgctagggcactgcccggaattgctcccataaaaacgatcacagattacacaaccgaggtgattacagcgtgtacatgcacagctaacttgactgttacgacaaccacctccagcgtacctgtacctgtgacaaccacctctagtttatcggtgacatccacatccagtatacctgtgacaacctccagtgtacctgtgacaatctccagtgtacctgtgataaccacatccagtataccggtgacaacgacctcgagcgtacctactaccagctcgagtatacctgtgacaacctccagtgtacctgtgacaatctccagtgtacctgtgacaaccacatccagtataccggtgacaacgacctcgagtgtacctactaccagctcgagtatacctgtgacaacctccagtgtacctgtgacaatctccagtgtacctgtgataaccacatccagtataccggtgacaacgacctcgagcgtacctactaccagctcgagtatacctgtgacaacctccagtgtacctgtgacaatctccagtgtacctgtgataaccacatccagtataccggtgacaacgacctcgagcgtacctactaccagctcgagtatacctgtgacaacctccagtgtacctgtgacaatctccagtgtacctgtgataaccacatccagtataccggtgacaacgacctcgagcgtacctactaccagctcgagtatacctgtgacaacctccagtgtacctgtgacaatctccagtgtacctgtgataaccacatccagtataccggtgacaacgacctcgagcgtacctactaccagctcgagtatacctgtgacaacctccagtgtacctgtgacaatctccagtgtacctgtgataaccacatccagtataccggtgacaacgacctcgagcgtacctactaccagctcgagtatacctgtgacaacctccagtgtacctgtgacaatctccagtgtacctgtgacaaccacatccagtataccggtgacaacgacctcgagtgtacctactaccagctcgagcgtgtctggcacaatcaccacgagcgtgtctgagactaccagctcgagtatacctgtgataacctccagtatacctgtgacaaccacttccagtgtgcctgtgacaactacctccagtttatcggtgacatccacctccagcatacctggaacaacgacctcgagcgtacctactaccagctcgagcgtgcctggcacaatcaccacgagcgtgtctgagactaccagctcgagtatacctgtgacaacctccagtgtacctgtgacaaccacctccagcgtacctggaatgacgacctcgagcgtttctgacactaccagctcgagcgtgtctgagactaccagctcgagtacacctgtgataacctccagtatacctgtgacaaccacttctagtgtgcctgtgacaaccacctccagcgtacctggaataacgacctcaagtgtacctacgactactagctcgagcgtttctgacactaccagctcgagcgtgcctggcacaaccaccacaagcgtgtctgagactactagctcgagcgtgcctagcactagcgtttctggcactaccagctcaagtgtacctgtcacaaccacatccagcatacatacgacaaccaccctaacaacatcgaggactattactgactcgactgccactgctccggggccgacgacttcaccatccactacagtaacaaccagaaccacttccagctctgtaggtgttaccactattccagtgtccacaacatcagcggctgccaccgatatttcgactgtcactatcccaaataccactgtcactctcccgggaacaatacttccagggaccacagtcacgacaatcattactgagactgccactgtatcaagtggtagtagcactttacccgggtccaccggtaccacaactgtcacaagtccagaaagtacagtgatcagtgattcaacgatcattattggcactatcactatcccaggtatgttatcacccattggacgtcaagtattattgcaacagctaacagtatcagtttcgcaaacaaccaaaacaatcactcgtactctcaccgttaccgggtctagtgcgacatcgacccagagccctagcagcgctacgtcggtgcctgcctctgtatgctccagtctcatcagtaatccatcttacacaccccccgccgtgttgccagatgactatacctggggctgcgcacccggatatctctgcaagcccggtcatgcaggtgaccgctcgaattgcaatattgaagcaggtcttcccgaccccggatacgtctgcagtccctcagactgcattgtggctccgcctttagacgttcatccgtcttggcagtacaatgtctcgaacatttattacaacctcaatccggaggacttcggtctcaattattctatcttcgaagacccactggcagccaacaataagcgcgacatgtcgttgtgggatttcgctgtcgcccaaaggatcaagagggccgacataacgaacatccctacagtctgttacaatgattgcctcgatgctgcacatgagcctcaaatgcttggaaagacacctgagctctgcaagagtgactcggcgttcatggaaaacttggatatttgcgaggagtgcattaccaacaacgctgaatccggctctgatcaatattcatccataatgctgccgacttttgcacagtggctgaatttctgctccgatatggtcacttccacaacagcacaaagtgtgaccagtactcagatggacactacggcgacgagcacccagattaccgctgctaccagcacggaaacatcgacagcagccacggtcacgagtactcaggctagcagcgctgaagctagcagcactgaagctaccaccaccgaatcggcgaccactgaatcggcgaccactgaaccgaccagcaccgaatcgaccagcactgaaccgaccagcactgaaccgaccagcactgaaccgacgagcactgaatcaacgagcactgaatcgacgagcactgaatcgacgagcactgaagcggcgagcactgaagctaccagcattaaaccgaccagcattgaaccaacgagcactggaaacacaggaaatgaaaacacgagcaccgagcccacaaataccgagacaacgagcactcagtccgacactgctaccaccgggaccgagcaaatatccagcccagagacaactcaaccagtcactctcatcgccatctcagcttccggttcaattgtgaccacctcggtatctggttcgcttgtgacaacttctttctctgggtcttttgtgacaatctcaacatccggttccctcgtgacaagcttagtccctggatcgatcgcgacaacatcagtatctggcgtgcttatcacagcatccttgcccggttcgatcaagaccgtatcaagcactctagggacagagactggcagtgaaagcacatctgacaatgctgccagtagtccgtcgggctcggttcagacgagtcagacgagtcagactgattcggcaacgacctctaccttttccccggcctacaattcggcaggatcttggaatatccctagtgttggcttaattggtctcttgtggactgctcttgtgccactcctctagaattctctttttactgcgtttggttttccatgtcagatgtgtgtgtgagatatttggtcaattttggaggtagttggtggatttattagtccattttaataaggatgattcaatgaaaacgcataaaggtcaaagaaaaacactaactagggtaactatacattagtgcttatatcatgtttttcaagtggctatgatattcgaaccgcctttttgctgttgtggtctcgtgccgatcacatgccgctacagtcttctactaattgctctctttcttaggaatacacaccaccattcctggaaaataactaggtaaagtgagtgaccgcacccctgggataattgtgtactgccacgcgacaccgctcaggaaccttggaactttattttggtgactagtctccattaggaaatcaagagtataaggatgagagatttgttgatgttcagattactgagtacgggaacaatgagattggctcttttatgatgtatgcaaaacctttcacaattatcggatgatctgagccattcgaagcataagtttctcctatcgagcaactgcttatatattagcgtaggttcaatagcaagctgaacatcggcttcttactagcttctgttgattcaaatcgacactaacgctaatcgacttggacagatagacaagacctctcggtgccaatttgaagtcatgcttctccttcatctccttcaacgtgatgggcagccggagctcacggacagtaaccatttcgtaagcgaaatcgtagccatcccagtctttgtgcttattgttgaattcggcattacccagcccgttttcttccagtggagcatcaccggcattccgcgtccgggcgaaccgtgtttcgcagacatgggtgatgctggagtgcggagcagtccgataaaaccagattcgtttcacactgggtctgaggcaatattttcgaaactcgtagttctttcttccgtcggcgatttgagtcatgtaggggtcctgcatcggtaggatgacatcgctgtgagaagggcatctgaccccagtctttgcgcgggacatgagggaactgttctgcgaacgtatgggcaaaaataagagggagattgcaggatctcagatcgagatatggagtgaagcataaaagttcacagtctacatatttatctggagtcgtacaagggatctgtatgcgcctttcccattatcgagggtcatgggacttagcatcggctggtggcaggaatcttggcagattagcaacaggttgaagtgactttcaggcacctgctaccgactagaagccttggttgtgcagactgcatcgtcatctatcgatttatctttcttaatctcacaaatagatttgcatagcaaaatgagatggatgtattctatgatgcaagaaaattcgtgattgatcgtcaaatgcctcggaatgtggaggcggtgatagcggtcaggtaatatccaatgagagagttatgccccggtcatctcctgcaagtggtcaccacatatccctgaaatggccaagcagcgcttgtcagacattctagccgccgccgatgtggatttgaacccttatgaagctctttacaagcatttccatacgcatcccgagctctcgctacaagagaaggccacatctgaaaggatcgcctcccatttgtgccaactcggatcctatgaggtccagacaaatataggaggttacgggctcgtagggactctcaagaatggccctggaaaggcaatccttcttcgggccgacatggacgcgcttcccgtcaaggaactcaccggcctcccctacgcgagctcagtgactatggctgatgcggacggcaatgaaaaacccgtaatgcacgcttgtggccatgatatgcacattacatgtctgcttgccgcagctgaagtcctggcccgtacacggaatgcgtggagcgggactttaatcgtactcttccaaccgaacgaggagcgcggcggaggcgcccaggctatggttgatgatggactttattcgaagattcccatgcctgattacgtcttcgggcagcacgtcatgcgaatgcgagcgggaagtgttggttcccggcctggcacgatcatggctgctgccgatagcctgaagatcactctctatggccgcggtggtcatggatcacagccgcatcagacggtagaccccgtactccttgctgcgcatgttgttgttaggcttcagggcattgtgagtagagaagtggacgcgaatgatcttgctgtcgtgacggtcgggagcctgcaggcagggcaaacagaaaatatcattgcggaccgggcggaaatcggaattgatttcaggactgtcaaattggagactcgagagaaaatacttgctgctatcaggcgcatcgttgaggctgagtgtgttgctagtggatcgccgaagccgccgttgttcacaccaacgaggcggttcccgcccaccgacaacgataaacatgtggcctctcaactggctgcctcttttgcagaccatttcgaagactttgacggcgataccccaaggaccaatgttagtgaggacttctccacgttaggtacttctcaggggcttccttgctctttttggttcattggaggaattgacccagggctctgggataagggtcagaaaaacgaaattcccatggaagagatccctgggaatcattcggcgttgtttgccccagtgatccagccaacgatgaaaactggggtggatgcgttgtgcatcgcggctttgacattcttgaaaaagtagccgtggctctccgggcctccctcgacgggttggaaacgtttagcactgcatgtaatgaattgcttgcagatttgattgggaattctcggttctatattgcagtgctaattgttgcacaggtatggcctttttgcatagtgtttattttattcctctgcaatttcactctattcattcccaatccacaagttgtggaagaaaacctctttatttttgatttctcgtccctcacatcaattttcaaagccagccaagaaagacaccacagcagaggcaaaggccttagaatcatcatcagttcccttacgagcatccccaatctgctccaagaacaacgccaatttcgactcatcccatcccaggatcggcgcagattccaagcacatattggtcaggccaaagggatccatttcgtaatgaccctgcacagagagtaccctgcctgggtggtacagtccctgaatagggcagattggagtgcttccaatattaatccacggcgcgggcagcgaaaccggcggcgactcggcaagcgtaacaacagttcccttcgcaaccgccatcacccgatctccatggaacatctgaatacgcaaccgttccttaggaagagcaccgagtgcgcccgggaacaacttcacaaaggcgtgttccaattgaacggtggtaagtccgacctcacggccgaaagggcatttctcaacccagacgtcgtggactgggtcatcaacgttgcggacgagagcgtgcgagatgagctggtggccgaaacaggtgccgaggatgcggacttcggggtattggttgtagactgtcttgatgaatttctcgagcacttgcatccacggtgactggtccatttcgcctacgccgggcgttccgccggtgatcaagactgcgtccactgggtatcgtacgggtatatgatccttgtcttcatggccgcggagagtgtataggtcgggataatggcctcctcggatatcaaacggggtgatcttgacttcgagttgctctttctcggggagcagggtttcgttcaggtgtgttgcagtctcgcagaggatggttcggaagtgggcgctcaagagtcctcgagcctcgtatagtttgcgggctggtatgtcgacgtctaggacggcgatatggatgaggtgaaccattttttcaaaatgtgtgtttaattgatggagggaaaaggtgaaatggagatttcgcacttgggcgtactactacataatataattttcccatactgactccgacgcagaattagacaacatttaggtaagacatagctttgtgggatatagtaatctatacaatataaggaacaaacgacacccagttactccaacagactccaaccactaccgaagtattaggtaaaagctaacatcgtcactcaagatgaccttattttttttcttgatccacaatctctacattaattctaccgaaaataacccgggtcttttctgttgaactttgtacagtctgtcccgcgtacaggatgataatgtgtgataaatcttggatttccacgtgtctcgattgaaactgacagatttgctatgctctgatatactctatctcatttctgatgtcttccacatgtgtatatgaaatatgccgagccgaatcggccggttacgagcttataaaggcttggctttccttgccgctttttgccgagactcggaagcctccgagtcttacataatcattagcatccccactcacagaacagcagccaagtcagcaaatcaccttgactataaaagggatactgtttgaattatagcaccggacccaagtttgaaattggacctatacatgtaccttgtggactaaatcctgtccgagttcaacggagtaaccttggaagcccggagttcccagaagagcggtgaggatagtaggcagaactatattcagttaggagggtgcacctgggatttcaggaaggttacgtatacctccaaaataccatgttattgctatttacaactctttataattatcaatacttgtgtcctaactcactatacatggctagccaagttgtcacatagtataatttgttcgaactctgctgcaattgattattatttgttcaagcctatcaccgcactaggaagataatagtatgcaaaattacagggacaagtaatagtgttgccgagcaatcgatatatagattaatcagaatcggagctatttcttggatcgctaaattacaggtagaatttcaaattaggaagacatatcaatcatcttgtcagccgtttcgagcaaagtgtcggccatgacatccatcttagtatcaaagatgtcaatgcacgactccttttcatagatcgagcagtaagcaccacggaagctgattattcgagacaagttagccggatatcttcctcattcggagcaacagcaaaacttacccagctttaacagccgcgctcacatcccacatatgcgccgccacgaaccacttatcatcctcaggctcaaacttatccagcataggctggtaggatcccatcgagggtttgaccatatcaagcggggactccctctcagattcatacttcatgaactgatggcaactgacgaggttctcggcgggcatttcaaagccggcgcgcttgaagtagccaccgactctttctgtgtcgcccgtggtcaagcaccagatggtgaaaccgttcttcctcaatttctccatcatggcgcggcagtctgggcgtagttccagcttcgaataggcatcctgacatatgtccctttcctcgtcggtcgcgaaggatctcggattttggataccggacagatataagacacggtagaagagcgccttgaagactttcttgtatggaacgcatcgcttggacatctgaagcatcagagactcgagctcggcggcttgcatccaggcatatcctaaggcattggccgacaattggtttgctcgcagtcgtgggccgaggatgtcttcgatggtgtcgataaagaagtcgaatgacacgcaagtgccgacgacatcaaagacggcatgcttcctgggggagactgtgttgggggaaatcatgttgtgtatacaagatgttgactgatgattgaatgaaattgaattggcagacggaagggattcttgggatacatattgcccctggccttctcatggtcatttatttcaatgcccttcgccaactccactggcaaccatggttcaatcattgtctgactccggcacaccgctatccgataatctagataagatcgaggtctactccgtgatgcgtagacagtggcggtgtgggtattccactccggggctaacgatatctggtaatcagctgtcaccggaccaggcccactccgtatccgaactccgtcaggcgattgcattgtttttgagattcaccggagtctctgccgagaaccgagatcgaaggaaagggggagcatctggggtatcaaatctgaccaagtcgatgttgcaacgaaaggtgggcgaagtagaaactaatgcgactttgcctgggatctttcagctataatttaaagagtcttggtagtttgatatgaaagagctgatatatatattacacagtttgaacagaaaggctggtggttcggggtaaagcgagcatatggcattaggaatacacttattctcatacttggagcagtctcaatatatacaatagattactattcataaactcaacacatagaatctctgggatacatcgaattcattgttacaaaatatctctcaaagtcaggtagatttgaagacccgaagactaagctaagatatcatactaatccacgctcagtcccataaaatgttcagcttgcgaaggcctttctttggttgtggcagcggctctgggttgcgattggcaatatcaataaacggttgaatgggtatatcttccagggggatgatctttgtcttgtgaatcaacttgtacgcaaaataaaagatgaagaagagaggaatattgatataagaggagacgaatccttcgtcgctccattgccctttgataaaagtcgagtacccgccggtgatgagcaggagactgagcatgatcaacgaggcccaactgatatatggctggagcggcgtcgcccacggtagagacttgcgagagattccttgtttcttgcagccgtaataaaagcgaagatacgtgaccaggatagtgagccagttggtcagagttgtgatggagacaaggtcttgcagccaatcaaacacggtgttggcagttgaggagagcgacatgtatgccaggcacatgaacagaccgtagagcgaaattgcgacccagggaaccgagaatctgttaagtcgagtgaagaacttgggggctttaccgtttaccgccagcccgtacaatactctcgaccctccgagcatgttcgagttgcctgaagaccacgccgacgtgatgatgacagcgttgatgattgatggcaccaccttgattccggctagggtagctgcgatcacaaagggagactcggaagctgtgccactagaactgctgagtctaggttcattggaggggaccacaaggccgaccatgaagattgagatgactaaagggaagacgtcagatttgaaggattttctatcttttagaatcaacataccatagaaaatcaatatacgaaagaaaatccgcttagccgcctgcgggatagcatgcctcggcgattttgtctctccagcggcaacggtaattgtttcaatccccgaataggcataaagagcactattcatagatgtccaaacaccgagaaagcgaccaagagagccaccgatgccaaggtactgaacgaaaggcccagggtggcgccagtattcaaacccgatggttttatggtcaggaccgccaccacaggtaataacaagagcctggttaatccttgttagcaccaaagccggtcaattcagtggcagaaacttgagcttaccattagattgactccaatgatcagcaagatcttcatcaaggagaaaccgaactcgagctccccgtatactctcacaaaggccatagaggtacacagcatgaccactccaaagatactgatccaaatcgcgctattgaggtcagaccagaactgcacgagcacagcagcggccacaatctctgcagggatagacacaaggtaggaatataccacgttgtagccgttggcaaacgataatgccgggtcaacaaagtattcggcgtagcggactattccaccgttcaaaggaacaagtgtgcccatctcgcccgtcgcaagggttacagttccagcagcacagcccatgaccaagtatcctagaaaggcacccaggggaccagaacgtgagattgctcgaccagaactgaggaagagacctgttccaatggtaccggccaaagcaatcatttggatgtgtctctgatgaaggccttgcttcaaggccgaaatctcttcgaagtctccgacatattcatcttctggttgaacaggcgactctgggtcgtgtatcatggtcttgacgtctttgtcgaattcatcgacagcgtcggtggaatgatcgttgtgaaaggtcttgattgtggacatcgcgattgacttgtattttctcttcttgtaaaaaaaagaatgtcggcaatattgggccgtccttgctatatggcgcagacctatgtccggggatgattagcctcgacttatagttcccttattagtggccagatggctctgaagtcaccgtgctaagcgacacattctttatctgtacacttaactatgcggataacatgatattgaaattgacgtcgagggtggccttccaaaagcagttagagggatgacatggagaccttgattggaagatacaaggttgccagggcccaatcagcaggtttgagtatctttgagacaaacgttgactgagggatgtgagatagcagcgcacgggtgatagatggggtgacgatcaactccgcagaactggaaggccgtaaaacccactccgtgagatagtaggaagctccgagagataagataactatcgtggcatgacttagaatagcggctcggagtaccaaataacgagtacgtacggagtaatcagaaaacgttgagccagatagacgtgctgggtgtttaactaatatgtcatttttcattcgtctggtgttacaatgctatagagtacatagattgaggattaaaggaactttttgcaggtcatcactgttatatctcgaagaatggagcctttgtttgtataggttgtacaagactagataatgataagaacagtcaagctgcataactctctcaatgtgcaatatgcaataaatatatctcaacgcttgatgccgaggacatcacccccgacaggaccgttcctcgccttctcaagcctctcctttgtcgactcaaacaatctggggataccagtatcttcaaacttgatcccattccgaaccatcttagcaaccccaagggcagacaagaacacctgaggcattccatgaccattgaagcctgcgagtacaaactggctatcctctccaggcacggtgccgacatgggggtgggaatcccagctgtagcccatgatcccggtccaaactttatccactttggccccgctgttttcccagccattgaaaaaccgctgcataaaaccatcgtaatggtctttgacctcctcgatgaggattgaatcgtccacgctgttgtaccatgaactcagaacagggtagtaaagcaagttggcgccaccgacaacaatgctgccgtcggcgcgagggatgagatatgaaacaacgttgtcttcttcgcggactatgtaggagttattcagcagaggcgctttcgtgccctcgggaactgaaatatgagtacactgtcctttgcagggaacgatggcttcgcggtactggggaagaagacccgcgatgtaggcattgttcgcatacacgactttccgagcgacggtcgtgcctcgtggagttgtaataataaagctgcctgaagattgccgactcacagacgtcaccggggtattagtctggagattgaccaagccagtcttgaggattgaggcggtcagatgcataattaatttgtacggccacagacttgcggctgtgaaagaagcagatgctttggcacctttgacacccgaaataccctccgcattcttgccagacacaaagaagacatctttcatgtaattcagatcacgggataccagcgcgtcatacatctgttcggccttccgggcagtttcctcgttggtccacacatcgatagaccttgtgagggtaaagtcacagtcgattttctccttttcaaccaaggactttatggcgtgtatatgtgcgatttcgaactccgttacctccagcgcgcgttcaactcctgctcggtcgatgagcctggccatgggggtgtacatgtcaggccgtaggtgaccaccgttgcgtcctgtcgcacccgaacagacaccccgtgcttccaggattgtgacagagagtttgttgtcactggcctctcctttgaccaagtggtacgctgtactgattcctgcatagccggcgcctatgatgacgacgtcactcgatactggaagctcctctgtggtccgatggtcgtgcagttcgtgaatgtctcggtgccaaaatggcacagttgcattttcgacgggttgccgggatgcattagatgagtcggttggagacatagtcatcggagtagaattgattgttgctgtttgatttggactcggaggacttgcgcaggttgatgagtaggctagtcgatgacctgctttgtcggcattaaataatggccggagtatcaggttgtttgatcattcgatgaggacactttagcaaatacaccgaatgaagataacgaactccgattcgtcggtattcaataatgactgatcaacgccgtgtctgcccttatcaacccccgcaaaccccgtgtcgggcccggcgtagtccactccgaaaggccaaaaagaactccgaaagctgacccaggggttatcttatcagtttgcccctttgacaaagcatagtcaaaggctttaatgtagtcaacaccgatggcccggaaatgtcggtccgttgacagtgctcaatacggaaaaggtggattaccttggtcaagccaaccaccctgagtccagtcaacagtgttcagccaatccatatcatggaatttgttcatctctgggtcaatatcctgctctctgcctatcgccataggtagattttgccctggagaccgctcatcttgcgggccatattgtctcagggactgctgttcgcctggcaactcttgtgcttgcatgccacacgatgaccccaaagaatcaaacacagcgtcgatgattctttgtataactgtcttgaacttcttgctaagctgcgcattattatccgtgggacgtatccagtcaagtaacgctctgaacataaccagaatctggaccacttccgaccgcgagaatttaacacagttgctagcggcggacgtcgatgtgagctcgttttgtggcgaagatggggctagattacttgctcggagaagctcgacgcatagaattcccgcacagggcattgcgtatgatactgcctggatggattcagttagtataatattctcaattcagaacggctaggttcgtcaaagacttacaatccagtcaaaggcatggtggaattcctggagttgatcgcgcttaagccaaagagacaggataacagacattgtctcttgggcgatgtcaaacaagtcttggccaccgctgaattgccgcgatacaagtaggcgctggaggaggaactggcattgcaatacgtcgagttgtatgcgggtgataatatagacttcatgggcgcttcgttcatggcattgtgagcttgactggggccattcggagtttctccgatactgaatgtgcggaggatatgaagcaactatcttccccaactgaacttgtagatttctacaagaaggtcggagtcagcgaaatgtacctagtatgcaatattgcttctaataacgcactctacctgcgatttggtaaattccgaattgacactaagggttagttccaagattccttcccggataggactaagcatggccagtgctcgaagccaggttgttgtgaatatctggccatttgtgttccagccattcgagtcaagctttgcaatagccagggccaatctttctcggtccccatatacatcttcctcgcttaaatcgagtgggagagggcattggcagtaacgattactgagcataggtggtcgcgcattgaatagactgtggcatttgtcgtggtaatacatcgacgcagcgagtgacgctcggtgttgagagaacggggtgatttcctttgcaggagtgaggcggtggaatcctgcgcttataaaagcaccgcggacagtcccgtagtcgactcgtacacggtcacctatcccgagatgagctctattctatactgccagaattcgtcctgatgtttgcgactcactctcgtcgctgatgatgatgctttgtagtctggtgctattcttcatgcaaataaccatggtatcactgatttcaaaattcccttcacaaagccttatacaggccgcagcacattctctcatcttgtctgcggcggtgtttcgattccgtccatactgttcgggtagatcaaatactggatcccactcttgcttgcatctgaaagcaattccagcccagctgaagaggatcccaatcatttcccatcgcaaatgaggcccaccaaaccagttcatccaggaaggatggtcggaattgcctgcgtgatcacattcaggtgtcgactgagaccttttgtgattgagaaatagatcatttgccactctcaatactgattcacgtgtccggagctcacccagcgcacttgcatattctgtccatacttgttttaaacaccgctgaatcattgtgggcgacagccatacatcgtagatatgatgaattccggccatcagcatgtcacatgtacgagcagtggggaagttaagtagtgttctgaccgccagttccacacgggacctggccgttgaatcaggctctcggcctagctcgcggtggctggaatttgtggcatcgaacatcactgcgccaaaactatcttgattttcaacaaaaacagccgagaagcgggtcgtctcgtgttggcccagctcctcttgaaatagcatgttccgttttgatgcggtggaacgggctgttagccccgagctcgcggcggggctgggatctgcaggagagagtgagatcgctgccgcgaccgaggattcagtaggaatctggaaagcgctagagacattttgagtggtcagtaagtcggcgggcagtgttgtatcgaagtgtatgggggtgtgagaagtcggagggcgacgtttggtcataggagcagggtgataaatgcaattcaaactgcgtaggacacatcgcgaacacttcggacttgcatggtcacagcgaatcttagccttgcgacatggttcacaggcttgcggttggccattatggcgttttcttggttctgcgagcatcatcaagtgtagttccccttaatatttcccagctcggtcatccatgcaaataccagacatgtctagaggataataagaaaacgaagtatggtcgtagaggagattaccagccccaaggccggtggattaagttcggctctatcgcgataggggggatattcacttgatgtcagccaaccagctgcccaggacgagattatccagattgcgtaataatacggtcattattgtatcaaataccgctttattttgcgtcgatcacgatcaagtgtctgtaagtttggtaacacactgtacggaccggtgaactagatgttctgagcacggtttcttcataaatagtggagtcggatttgtccggggtgcatgaaagcctcagatgaagagacagtgggcagtgaaggatattcagagtatggtgtctcgttgggaagagtctggtctgttgtgataaacagagtagacagatacagacgagctgatctatcagattccgcttattaaattccgctcatccctctatggccatatgcaaagggaagattctgtagcatcggcggacccgagatatccgaatacgattgattagccgaatagggaaaagcccgacacttttcttgggaagggcttcacgttgaacgagtctaactaacttggcctccttggagattatatcatcattgacgtatctcctagctccctctgtttcccaccacatcttcacctccaaattccacaacatgacccgttcaatacccctgaacggggccaaccaaatcccaatgaaagaagatacccttagacgccggaatatcaatggctcgcaagtcgagacagttggaaacggccataccagcccatcaaagtcagccccgaagccccaaaagccgccctcccttctccgtcgcagcagggagttcgcgggtaagcacacatggacattcccattagcgctcatgctagccatcctctcggtatatgcgctccatccgaccgagtcgaatccaatttctcatttcatattcctatcttacaaagagccatccctggatggcgaccggaacgccccggcgcagtatggcaagggtctgtgggacatagcgttcgtgtcattctacgtcatcgtgctatccttcacgcgcgaattcatcatgcaggaaatccttcgccccttcgccgccgcgcacatcaagtcgcggggaaaacagacccgcttcatggagcaggtgtacaccgcgatatacttcggagtactgggtcccgtggggttgtatgtcatgcgccagacgccggtgtggtacttcaacacgcgcggcatgtacgagctcttcccgcacaggacccatgcggcggagttcaaggcgtactacttgttcgaagcggcgtattgggcgcagcaggcggttgttatgttgctggggatggagaagcggcgcaaggacttcatggagcttgttgcgcatcacattgtcacactggctcttattgccctcagctatcgctttcactttacgtatatgggcattgctgtttatatcacacatgatattagtgatttcttcctcgccgtaagtcgcattcaattcttctggtttccgacaacccgaatattgacaatctcccaggtttcgaaatccctccattacatagccccggacataatggtgcccttctacgcaacctccgtcggcagctggatatatctccgccatgtactaaatctccggatcctttattcccttctaaacgagttccaaaccgtcggcccctacgagctcaactgggagactcaacagtacaagtgctggatctccaacatcatcaccttcgcactgctggctgtgcttcaggcgctgaatctgttctggttgtactgcctgctgcgcagcgccttcaagttcctcctgacgggggagaagaaggacgatcgctccgagccagatgagtctgagattgagcaggaatacaaggttggtggggaaatcaatggccatgctttgaatggcagtgcattgcccaatggcaagcctcagtgtgccgctgatggcgttgatatctctgtcaaggcgccctaacgatgctcgtgtggctttttggtccttcctgtgggtgctcacactgaggagccacatattcatccttctcttaccttgcattgcctttgctgttcaacgattttgaacaaaagtatttgctcaatctaatccatcatgttgccatgtatcatggcgattcgattttctcttctctgtctgaccgttgctgttgcgatgtctcacttcgtacgattagatgtgccatacgatatatgataataataatttagacttgaactagggtttgatcatcgctggtcacatagacaatcattccaaggggtggtctgcaaattgcagaaattatatacgcaatcaaggctatgcccgcacctcattgctcgcgccgtatgggcaaaacagtttaaacagctaacaaaactccaaggctatgtgcgaaagtgtggatctacaaaatgagatatgaacagttttgtatcacagcataatcaagaaaaacgcaggcccttgctaggatcccaggttcccgtttgaggggcacgagtgggctgagtcggggctggtccagctcctgtgcttggagtggcattcggagggttagcggcagatccgaatcgaatccccatttcgggggaccacatccccggcatacctcctggcatgctcggcgtagaaaccggaggcggggctacaggcgcgcgcactggttggggtgccgtgagagggggtgctgtctcagctgggcgtacggtgtgaacgggtgggggtagttgtgatggcacatggatgggctgcgcagctgagtaggcggagggagagtgatgggtccgaggtgactcctgaggttgttggcgcaggtgtggctgagaaatatgcagtgaggccatcgctgcggtattggagatgtctctggttcggggaaatgtaacgtcagtgataatccgtcttagtaatgggtgggtaacacatacgtttccagctggcttgcctccatccgacgttgatggacaaaaacctttgcatcgtcgcggaatcgggctacaatctttgccagatcattgtaaaacttgcgcccgacgtcgaggttggaaatgatctccttatacttcagatatccattttccagatcctgcagtgccgcttctcgttcctttgtcgacgcatcacccttatgagacccagtaaatgtccggttagcttctcggacttggtccgaaagttgatcttgctctcttcgctcttgggctagcatctcacggtccgaatcgtatagcttcagatgctcctcgaacaaatcctcgaactggcttgcttggataggctgcatggggaattcccgctctagtcgagctgtctgtctcaaaagtgccgggtctaaatgcgatccattagtccagttcaagattaatggaaaagaaaatacgtacgaatatcatccgcgcgacctttgtccttcaaagcttgaattcgccgcctcctccgattctccattcgagtgacctcgctcaagcaaccgcgcaaccggttagcctcgcgctcaacctctggtggaatgacaaccctccggctactaggcacaaaggattccaagtcccgatttgtaccagtgagaacgagaaagacagatcgtgaatctcgcagcttgcgctgcacgaggtcatcactgccctgggcggatgtgaaatagccgtcaatttcggtcaaactcctgtagagcttaggcgcggcggattccgaggttccgcgggtccagcgatcggtgccgtatttatggcgagccgcaaggtcctctgccttttcagcagctagaagctcaacaccttcattatacacagccaaatcattgcctttgactctggcggtgtcgtcgatagaccggtgcaagcgattcaggccatcttgctggcgcatttcctctgcgtgcgacacaagcgttggcgggagacctaatggtttttcgagcgcttgtaatgaccctggcaaattgagcgatgaaagcaagcttgaacctgatgttagcagaatttcccttgggtgtggtatttccattgaatacatactctcgcaacttgtcggacatagactccagctctccaatgagagtatcattgaccagtcggtctcgacgatcagtgtagatactggcggcaatgtgaactgcatatgggaccaattttgagaacagcggctgccccaacggaccattatcaccaagcatagagatcgcatcggtaacctgcgaaggtgccttggcgagaaccatgctggcacgttcaatagtcttgagctcagacttgggcggcacagggttgatgtaaatgatatcgttatccttctcggcacgcttgaggtcttccacgacacggctcttcaagccattcaagtcacccaatacagtccgattaatccaccgctgctctttcaacccttcaccgacacagaccaaacaatcgcgcagccgagcaacctcttctccatatttgcgcttctccaggcagtcaagcgcctgtcggaactgagcagcagcagcaaagtggtggtgctttgcagtcatgtggtggatccagtccgtgctaattgcattagacttcacagccaagtcacctgcatccccgtagaagtcagacaccttggctgccagtttcgcaatagatacatccttcagtccatctttaacagctttctgccagaagcattcctggccctgtccgagcaaaagaagttccaaactctgcagggtcacctcatccatatcctctggcggcgacgttcgaaggtctgggatgatatcggttcgaaggtggctcaacactccggcggcggagcagaggtagttacacgcctgtttgagtccatctgcggtagtccggttggtcgcatatgcaagctgggagtataatgcggcaagattgaatatgatattcgctagttcgaagcgcaggttattttgtgagactagaagccatgatgtatttctattaatctcgtgaccaccaaatcggacctcaatccaaaaaaaaagaactcacctggtcgcgaaacattaaagccaaaagccggataccacgaaaaatccactccgacctaaatatcacgccgaccgtcagcttcgaataccaaaatccaagagccaggactagaaaaaatgcgcacatcaactgggaacttcccacccagccatttcagctgagccgcatatgtgaccaggcgactgatgccactgtaatgcggttcctgaacattgatggcttcagttcgtagacgatcaatgatcatcagatcctccgcaaacatatccgggcgttggtcatatttggtcgatatgtattgggtgatcgctgcggaaagcgagacgggatgggaacgccgaaacgggagctggagaatattactgtaggaatagaacagaagaaccagtcagtgtcattcctctcttctcgcactcgctcatatgctgctgggggtactcacgacgccattgtcgctcgaggcggggtttggaagagtccgtttgttttgactgcgggaagttcaaccccaccgggcaacggaatgacgcttcgtggcctgaggcatcaactcaatacttggcctggttaaaagctgtcttcgacacttaagtcttacccctcccatttagcgcttgctgaatgtaaggaattgactcgtcttagtatggactaaaactattgcgcattccgtttccgtcaggcaatgaattaaggagacctacacctatgactcctcgctgagaataggccacgaccaacgcgcccattattgttcctcgggcttcagtgttgatctacctaagtagactcaaaagctgtttctttccaggacaaaaaggattgaacaatatattcttgaccctttacctgaggcactatttccaacgcctgtcattcatcatatgttctcagaatggcgacaccaatgcctcgattcttgaccatgtcgcaaatccgaagccttcatcgcagatttggagtcccccatgcccccctcacccagatagctatgctggaatctgcagtcaatgcgccggtgaataagaaccactatgagaaggatcgcgatgtgtttcggctggcagcgatcctggccgaacggatcatgcagaaccacgcgtttcaggatgggaacaaacgcactgccctgctagcggctgatattttcttgagggttaatggctattccctccagaggtttccatctgcagatgatgcgcacatcgagggcctcgcagccgcgcatgttgcagtcgtcactaagaaatggaccgttgaacagctgtgcaactactaccagtctgtcgcgctgtctttaacctagttcatactgaggttagacagtactacgctgcccgccgaatagcgtgctgaagataatatcccctctagttctatgccacttggcagcacttggctgactcgatcggcaaatccgggccccagctgtctatgtatcagtgctagactgccgaagcagaaactgaatttgtaccattgttagtcctatttatcacaactcatacatatttccgcttaggacggtagtcgtagggctcgtattagactccgactagcggggaaattaggttaggatatggagacgaggataactcggcgactccggaatacaacacattcttggccaacgtataatgcacctatatatggaagagtcccaccgaagccaaaatcctacgtgtcgtgggagaaaaagcagtctagatcggtcttatcccgacaccgtatagctcacgagtcacgcacaggttctttaacaggtgggaaaactaatatataggcttgcccgggtttcccgatagccacagaaaccttcttagataccaagtcacctttcatatcttaggtgataaaatccgcagtagtcttctaaattcgagaaccttgtgtcccaaagtaccaggaaaggagcgagcaacattgctattcatgagcaatctttccatcgtatctataagataggcacataggataccaagacccaaataggacaccgatttagggttttttcctacttggcttagaggtgggggatggtcaggggctgatctctacaataatcacatattctttgccatctcggcctcagccaaacgcggctagtgtggctacagcctctcaacctcctaggatattccctcgtataccgctgagtcatatacctttaaggcgtaaaattcagacatctgcatttggagccagacagatcatgatgataagatgttagacaaacagggggtccgtgtcagacatagccagccatggctaggcgggacatggggtgcagcaccatcgcaagaactattaattgctacgctatgccattttgggatcatcattaggctttgttgggcagtactattgagatcgatcacatatactttacaaggttggttagtagacctccctagcttttaatagccgctttccccctctccaatagagctatcgtgtcgccctccatcctatatccaactttattcaactccgctactctactctattccgacctacaacctggtgcaaagcgttcctgttgtgacaacactgccatgacggcacgacatcgtatgttaccctgctaagtagcttgagaatgcatctgactcactatatactagcgtatcgccgcctggaagtgcctgatggagtaccattcgagctgaaaccctcgccaggcaaaggatggggtgcttttgccacaagacgcattgaccgaggatctctcatccttagcgaaaagccaaccttcgttatctggaggtctcacagagaaatcacggattatcatgttaatatggcgattcaacaactgttgcctagtcagagagtacaattttcactccttcgcaacaatgggtcaagttggtttacaagtatgaacgaagctttcgctgagaactcgttcaacatcggaagttcagaccgcaatagggccgaagctcatggccttttccctcttcactcgcgcttcaaccactcttgtataccgaactcgaaaattccaacggttaatggcgaggtcatttcaagctttgcgaccagagacatagaagctggcgaggagatcaatttctgttataataccgatttcgaaggaaagactagatatgagcgtcatcaagccttacgttttacctgcgattgtttggcatgtcggcctggcactcccttccaagaacttagtgacatgcgacggcgattgatccgagggcttcaataccttacgcgtggcgtggacttggatgggcaggctgagggtttgcatcctattattgtcgactcgacattgaagtttgtcgcagagactttcagcatacctctttcctctagattgatttatactcttctgacaattttctttctcgaagaagagggattgctagatgattttatggacgcaaggttaagaccgacattaatcaaaacggcgcaattgttcaagtctgaaagcaataaatgcattgtcaggctagctatggaacagaaaacctgggtaaagaaattgcaagtggcattcacactatatggccgagaagatgctgccgattatgaagttgccctagcgctacgccgattgcgcccgttgttttaatggtttccctttctttcatatttcaaatgttgataattcattgtgctatttgataaaaaagagctttaagctcatccatgtatgtgtgtggataataaatacgagaaaagacctcgggatgcagagtaagacgaaaatccagatgttcaacgcaaagaaaatgttcaaaaaaaggactgccatttcatcctagtatgattgcagccttgccaacggttgagtttaatttggcagctcgtcaatgcgcattctgatgtattcgaaaatgctgagcaggatcatgttgttgacgccggtccggataagaatgatggacaggcccttgtacatgccggatttggcaacagcttgtgaggcctcaccaatctcactggcttttcccagcagaacactctgtgcgcgagtcttgcgcgtatccagaggataagtctatgagtcacattagtgcatgtcccaaaacagggtatcggcctgatcacatacgcagaaccagggcacggtgctgcaaatggcaccggcaatcataggtgccccgaaggggtttttgtcttggcccaactccttggctgcgagttgcttcacagtctcataaacaccaaagtagagtcctgagcccacggtgtcgcgtaacgcatgcaggcggaaaccggtgtaaaggccccaaattccatatcgtccatagatcttcttgatggcttgaacggtacccaagcgaggcttgtcacgcagagatcggtctcggactgcgtccggggcagccatggcgcggtgagacactagaactgaagtttgaacgacattcttcgccaactcgaaggggcctattttaatgtaagcgcggctcctctcactcttccatgtatcaatctaaacatacaggcaataggcgatgcgaccaagccagcgatgaggcctgcagtggtgaaagtaagaacacccgtcacggtggggaggcttccaggcttgttgtagttatccaaagggttagaaccagttacgcgttcgacgttatcagcgatgatgtccttgaaggcattgtatacggtaaagttgacgacgcggactaccgtgacacttgccaagggtggaagggcgcctatgtgatggtcagtcgatccttcagctaccgacttagataccgacttaccagcgacatatccccgaggcccttcagtgacccagagatagcggacacactgccatatgttcttgaaattgtgtctttcaaactaatcagcatattaatcccatctctaaggtcatatcgaatactcacgtctgcatccgagtcttgacgttctctagaggagtctgcccatcggagaaggattagcatcattcgcatctcatattagtcgcaaataaggattggagtgtaaaacaaaagctcgccgaatgagacactcaccaccgacaatgtagcgcaaatagtcgacacccccgatgcgacctgggttttgtacttcttgaggagtctgttgcgtgtggcctcatccatgttccaagctctgtgatcaggcatgatggcggttcttgtgtggtgagttgatgaaaatatggtacatgttcagaactgtttagttaccccgaaactttctccattggcagcgcggcgccgagaaatagctataacaatggttctccgtggaaaagcgttttagtttgcacagactctgatgctttcaggctggggaacccgatggaacgcaaagcggcctctcagaactagagtagaccgttcagcgtcccacagttgaccattaaacagctcgaccaacccagtgctatcttcagtctgttgaagagtaccccagcaggttttcacagtataaattggtgcgtttagatccgatttccagattatgagatagattcgatattagtggccggtacaatgacggccacggcaatgggtgcaaccccgcgttcacgcgttcacagatggaatcgaggtatggtgcagaattgagcggttcaagtgatgttctaagagagtcccctgtctcagccagtcgggatattcttgcgcaaggtgtatcgtctatagcaatgggttactaacagtgatcgcgagctatgagaagacgatcattagcatcaatttgctttccccatgtttctcgatggtaggacagaacggattgtgagtattcattttcaagaggacaacttacagacgatattcccctattccaccagacaaactgtgacctcaatactatgtgaagaaaagaagagggaattgctgcaaaatggcatgtggaccgagcttagctcaggcgctcaaaggggtttagggccaaacagagtgacgtcgttgtgaacagaacaggacttcttctgtgaatactggcattgtttgaacattcgcattgtttaattgactacttcgtactttgtatgtatatccatgcagagatcatgatcatattttatcttatttccagcctcggcaccgccgagggacatttaccggtcgcggtctgatcatcacttctttatatttcgtgtagagataggtagagacaagcatgatactttacgatgtatggagtacttaaagcggggagatcatcgcaggttagaccatggatcatggtaatcagtgcaatatatgtggaggacggtactccgtgacgagctcggggccccacgcagggattagggtcatgaccacccattaatcgcatcagtcgaaaccatggaattattgtaacccagattacagcctcaaatacaaacattgccgtggttgggtgatgctgcagatcattgagcaacacttcattgcctcccttgctagggctagaaggattagctggaatgtggctcatagaacgtccatatgtagtagtcaaaatatcaactgatcgattgcatgattgtcgacgcctggctcaaactgtgctaccagaatcaactagattagaattgaagagatgaattgtaatagtaaccttgtgattgtctcgtacgtcccggtctcttttcacatgagatctctactcctcgtctgaatagattcctacttatagcttaatttggaggttattatacttaaaattgtcaaccaagttccaaagagtattgaggtaatcgagtcacctcaggcaatatatagtcacaatgcaaaagtttccgttaatctgctcaaatatatatatcgactacctcggccctttctagtcgattgaatcataatattcggccacttatgcgaccttgtcatgtcattttggtagtcttcctagacgtcttctttatagaccccttctcacctttttaaagtttcctaggtagactacaattttacggaaacatttgcagtagcactgtatatccatgcagtataagcttattttacattcggccgatctccgtcatagagatgggatgataaccgggattgaatattgacctcatgtacacacatggtacgggatgcatacttgaatgttccaaggttgttagtactagccttgaattgcttaaagatggtatagaatacctctgcaatccaatgagcagagattgtaacgatatgttgtgtcactgttgccggaagaatcgaaccacagcgtcaaatgacttgtgtgtatccttcaccctaccatgggatgatcggtggcggagtactttgccggcatgaatcaggcaccaatagctgaaaatcaggcatccaaccctcttcggttcctcgggacctcggtccttccccgcaattttatgttgagctctccacatatcccgccgattcttatttatgaggcctcgcttctcgagtcgaacctataccaactccacctaaatttatctctgataaatcaacccacatatacaccatgggcaagaagcaaggaacccccgcttatgtactgggcgttggcatgaccaagttcatcaagccacgcggtaaggtcgactaccatgagctcggctatgaggctggtattaaagccatgctcgacgccaagatcaactatgacgatgttgaccagggcattgcatgctacgtctacggcgacagcacctgcggccagcgcgtcttctaccagttcggccagaccagcatccctatctacaacgtcaacaacaactgttcgaccggctcgactggcctcgccatggcccgcaatatggtttcccatggtgttgcggactgtgtgctggtcgtcggcttcgagaagatgaaccccggtagcttgcaatccatgtacaacgatcgggagaacccaacgtcactgtttgggaagatgatggccgagacgcgaggtatgacgaacgcgcccggtgccgcacagatgtttggaaacgcaggtagggaatataaggagaagtacacaacctctggagtaacaagaaaggatatcatgctaacatgcgaaaaacaggtacggtgctaagaacgaggacttcgccgagatcgcccgcatcaaccacgagcactccaagcggaacccctactcgcaattccagaccgaatataccctcgagcagatcataaacgcgcccatgatctacgagcctctgaccaagctacagtgctgcccaacctcggatggcggtgccgccgccgttattgtctcgcaggagttcctcgatgcgcgtccccacctgaaagaacatgccattctcatcgccggtcagtgtctagccaccgatgacgacacagtctacagcaagagctccattgacctgatgggcttcggcatgacgcgtcgggcgtgccgcactgccgtagccgaggccggcgtgaatgtcaaggatatcaaggtttgcgagctgcatgattgcttctcggccaatgagatgattactattgatgcgctggagctgagtgaacccggccaggcccatgagatggtccgccgtggcgatatcacgtacggcggaaagatggtcatcaacccatctggcggtctcatctccaagggtcacccgcttggtgctacgggtattgcgcagtgtgctgagctggtctggcacctgcgtggctgggccaacaatcgcctggttgacggtacttccgcggcactgcagcacaacctcggtctgggcggtgccgttgtcgtcaccgtctacaagcgtactgatggcaaggccgccacggctgtgacatcagacgtcgttggcaaaatcaacggtttgggctataacccagctgtggaggctaagggcttcactgccgagcaggccaagtccgtcgtgagcaagacgcacagctctcagtatgccctgtcagatacccaagagcgggtccttgccaggttctagaggcacagctaaacaccgttttggccaagcaatttgtacataactcaaccagactgacatgaacgatatccaatttttttttaaaatgcaccctaatctatcccatctatatgcccaaaatgttaagattttattctataaacaagtttcctaaaccgcaaaagaaatcatgaatcatgaatgcgtcttctcccaatcctcggggagcctgtagtccttcggcacagaatactgccctttacagcttcccggaccccggcacttcaaatcacacttgccatataaccgacaatagcactcagcagcactaggacaagaatcgcgattcaaccggtcaagatcaattccccgttcaccagcatggtccgcaaaaagaatgtgccaaatgtacgaaacaatccgcccggctatacggtcatcaccaggcgcagccctagactcccgatacacattccgcgaaaccccatcatcactcccatccagcagccactgcctcagcgcaatatactcactctgagcatgctgccagatgcgctcgcgggaaaccacaaactgcgcacagcactgcgcgcgaacggcatcctgccgaccaagataaagatggacagcactggtaatctcctcgacacgcgcatcagcatccccgccaaagatctggccaagcgcctccggcagtgcgagatccgatgccgagcgcgcactccacggcgacacggcgctcgacagcctcgtctcgagactgccctgcgcgggcacggaagaaggacacgtgccggcgctccagtcgcagcgcaggttgctgtacccggctttcagtgcggcgtggatgtccaggctgcgtaggagtgcggcgttgtcgtagtccgggatgtcgttgtgccaagcccagcggctgccgtgcacaaagacggcgccggcggagggtatgtccgcgtaattatcgattaggaaggttaagtaggccattgcttcatgtccgcggtttgcggggacttggagcagtttggaggttttgtctgccggcgcgtccacttgatacatgcatacatggtactgggtgcggagcggctctagccaggacgggtcgccgtccgacgagacatgggagactatcagggctggtttggttgattctgctaggccggggcaaactccgcgggcttctgggatgatggatgaggttgtttggtagcggactttggtccaggcaaagagtttgtccttggttgattgcgggcggtttaagaataggatgaaaaataagatgcagagaaagaagattagttggataagtgatctttgtacttttcggcccatgtttgtatattaattcatgcaattatatgtgtcttcatttcttttgcctccgcgttgatatttcagatatttcggatcatgcgggaatgttggtgccttaggtgtgaatatcacccctatttgcaagatctgcacgatctgcaggagaagtgccgagaggtttagatgtggatgaacatgtgttttattttggctttacccttgaccctgttatgtttggcgttcattcctgcggagtagtgtcatctgataagtggttctatatatattgtactatcggcctacagtgacaatcagatattagaaccataggagtccttgttgtctcataagtcaggacaaatatagccctctaaaagccataaatagagactagttatggtttttattgttgcctagtggtaatacactatattattttccacattatgtcttatttttctgtcttcgctcttgctttgatctcgtttcaccaatatccccttatagtaatttgctaatacctcctttctcttgaaaatgtctgataaattgctactatacagagtataaagtagcaacataatcatgccacgcccaccgcccacctctatcgttgctcgattcctatgagagacgttgtacttcctcgtgcttatgatcgtgctttgtcattcgaagtacgctttaatcttgatattggtgtgtgcgaacagggcagacagaatcatccacataaatccagagtgcgggaatattgagttgattggatttattgatctccagaacttcgagtcagaatgaatatttgaaaattctacatcttagcatgtatccatatttccgtccactccatttatagatttataccctctttctccgtagatcattcattgagtagcattgtcgggatcatccttcctagagtctttttgaaataacaacctgcaatttcccgataggaaccgcagcaacccattctcgtcgtgggggaaggattgcttcaacatcgttggacttttccagttgttgaatatgatacttttttaagatctgggagacagataggtaaagttccaaatatgcgaagctatttgttttctgggtcagcaaattgaaaataactgtatgtgcacgccaatatcagattatcacctactgattgccaatacaggtactgggacccttggaaaacgggatataataatcgttgcgcagaacagtcgagtcttcactctctttctcgagccatcgatcaggccgataatagtaaggctcagggaaagcagtctcatcatgtaggtaccagataggcgagctggaaatcatagtctgcaaattattagccaaataacaatacttttttggtaagggggcttacaccgccaggaatatgctttccagcaagcaacgatcctcccgtcggtacaattctgggtagcatggctgatgccgctccagtccatctaattccctccttcacgcaagctgtcagtcttggtatagactcgagttccgtcatatcggtggtccaattcgcagccttcaagtctgaaacaagatcattttgcaaggactggttgagggatagtgcccacagtatatgcgcgagcgtggcggaggttgtatcagtgccagggcctaacatctccttgccttctgacaaggcagactctggagaaattctttcccccgccagaaccttcagaaatgacgcctcgggtgctttttcagagtctgttgcaagtttcagctgctccattgcccactggaatactcgttaggatttcaacatgggaatatctttgagcttttggttatacgcacatcttcaaactccttgcttgaggtcgatgggccaccccagccggtaactcgagaagttacttcacaaatcctaccatacattctcattatagtgggaaggttggtgtgctgagaacttatatcagcgtgatctttagtgcaatcatggtacataccagtgacatttttgatgactttaggtcgttttctttgatgatttgtagttcttttcctcccatcaacgagtcaatggacccaatagagcttccaaacgcgaatcttgctagagacatcacgtcaaaaattcgccgtggtgatttaccggatattcacttacaaacaatgtctgcttcaagggctcgacaggtagtaaccaaatcgaaaggtccctggcttaatttttcaagcaagatattaaatctcgatatctcatctaccatcatctgcgtgagaaggggcactttgcttcgattgaagagaacacccatgtgccggcgcctttgtgcatgttcttttgggtctctatagaagcaatttagtaaccttctattcctcgtcttgataattcactcacgtaattgagaaaagagctgggtgtccatcttgaacgaactggctgtagactcgaggatccttgacaaatttactggctggcgcatgtacgcgcttgtaaatatcgagcgagtagaaagatacttcatttggacctattcgaaccaaaggaccttgaaagtcgtgagaatttgtcccaagattgaagtgttgcttttctgtcggccaaccattcttggatccccacgtttgaaagatagtaaaatcagtgttagaactagaacttaccaagccgcttgtgtagctttggtagctccaaagtcagatgtccttgatattccgtggggaattcccatagtaagcgcgatatcggcgcaagtagactggcgtttggaatatgcgacagaggagaaaagaagtacgtatggacaagctttggaaacgatcagttggttctcttaaacagcagtcttaggcctcttagcatacccatataacagctaccagagcactaagaatgccccaaatcaggaatgacatgatttctagaatctcacttcacgattttcaccgataaccaaagaagttacagatgcctttataagaaacaattatatacggtcggccctaagcaacacatcgcttgtacctgccgtattgctcgatttttcccgttgtagtggttttgcgccaggataacaccaccgcgaccgtttgtggcataatctcgcgccattcacaattttcccattgaagagccgaggtccacatttgtacagcctaaaaattctagctctattgatgtcgaatcgtgcgaaagctagtaaataatgtgattgtagtcttttcccctgacttcctacttattctactcgggcccctggtagaatcgagtcaagaaccatacacaatccactttcgcacctcgcagccatggatgatcttaagaatactgaagaatttttggcgcaggaggtgaatgccagtgatgagaatactttggtatggtatcctctatgtgcaacggagatatagcacgaattaacatctgttgtctctcataggagcgtctagggtataaacaagtgagtggaatgatataaatcttcgattcgagaactatatgctgacttgatacttcccgacataggttcttaaccgcagctattcactttttgagaatttctcaacctcgtttggtatctattgctgcgcatggcgtcttgttcttggtcactaactgtttctattagctgctctatatttcgtcggtggagttcgtgtgacattcacgacgggtatcgcagctggagggccactggcttattggtaatgatcccgaaccgattcaagcgcaataaggtggctttattaacctatatattaggacgagttatattataacctgtgtgtttacattcatcacagcagctgtgatcgcagaagcgtgttcggcatctccttctgctggttcgatttatctctgggctgcggaggcaggtggtaaaagatttgggcgactctttggcttcgttgtagcctggtggagcacaacggcttggacaacattttgtgccagtatgtctcttgcgtgtcattgttgtccatatctgaactgactgattgacgaatgataggcaatacccagtcagctgtgaactacatgctttcggtgggtatcatgttgttatatctgacagtgtcaactctgaactaatttgacttaggaattgactgttttcaatgtcgactttcccaccgatgtctcaaatatcaagtttcgcgctgtccaatggatctgcaccgaaatcctcctggctttagccgcattgatgaacctcgcatctggtatgtacactctcatagatggcctagaatgatgggctcacctcttaatcttggcctgcaatgctgattcaattgtacagcgcgagtattcaaatacgtgttttggttctcaaccggtgctgtctttctggacttcatattgaacgtcgtctggcttccaatcggtgcgcacaacaccttcggcctgcggactgctcatgaagctttcatgactacatataacggaacgggagctccagctggttggaactggtgtctttcatatctggccacagcaggtattctgatcggatttgatgcctccggtcatgttgccgaagagacgaagaatgccgccgtcaatgccgctaagggtatcttctggagtacaatcgtcagtggagttcttggcttctctgccgtgatcttattccttttcacatcggtaagtctattcaggaacttttatatagacccataaactaacaattgccagccgccaatcgatgttcttttctcatataacgcaccccaacctttcgtgcccttgtatgctgcacttctgggtgaaggcggacatgtttttatgaacgttctctctgtcgtagctttatggctagtatgttttcgattgctctttcctacaactgacaacaaatgctcgatgtaagaggacatgctaacctatctgatagaataccgccatcgccattacagcagcctcccgtcttgtcttcgccgtcgcccgtgacggagtactcccactatctggatgggtatcgcgggtttctaacgagggtcaacctaggaacgcagtccttgttgtgtggggtgtggccgcgattattacctgcactatcctgccgtccggagtggcatttacttctctggtctcagctgcgggtgttccttcagctgcggcatatgggctcattagtcttggaaggttgactttgacctcgggtgagaagattgaggctaaatggtctctcgggcgactaagcaagccgttccaactcatatcggttttgtggaacggttgggttgttgcggtactcttctcaccatatgaattcccggttgaggcctcgacgctaaattgtaggtgtcgtcttgtcgcgaaactagcagccattggaagagactttgtgctaatatatttccagatgcgccaattatcatggctattgtgactatcttcgcgctcatctcgtggttcttcactccagcgacagcgtgggtaccgcggggccggctgtcccaacctgttgcagatattgcaaattgaattgctggtttcattctcacaggtcgaaaacatgaatgtgtgtgcgatagagggtcgcaggaaagtattgcgagccattaattgttagatcggttgattccttccttcattattcgaaaccatgtttctatccatccatggatatatatcgcccacctgcactttccctgtatcttcaaacacattatgcaacatttatcaagtcacagcaaaaaagacttgagagatttgacagcccattagattcccaagttgacaaattgaaatcgcaacacagaggttgccagatcagccacgtgaccatgacataatccgcgctactggccccgtcgaataaaattttgcgatccgctttctcttttcctttcttcttcacttcaaaacatatacacggtccccaacacactcttgtcgatggaacaatctcactctatctacatatttcagtttagggacccagaccgaagaatgctcgttctaatcccgccccctgacatgcagccagaggggaacgggttcgcttttgagccaacattcccaactatgtattgatatgaaccttgcgatttagtcttgcagacttttatgcttttgcaaccggtgtttactcgcagggggggggggcgggtgggnnnnnnnnnnnnnnnnnnnnnnnnnnnnnnnnnnnnnnnnnnnnnnnnnnnnnnnnnnnnnnnnnnnnnnnnnnnnnnnnnnnnnnnnnnnnnnnnnnnnnnnnnnnnnnnnnnnnnnnnnnnnnnnnnnnnnnnnnngtgtttactcgcgggggccagctttggctggccctgaactcttgatgttgtgtttcaaccctgcgaggcatatgttcttgcaacttgcatggtcatttcctccagacagggatggccatattcgcgtctttgatttactaacacagctagatagatgtagaaagcattggcatcttcgaagtcttgtccgtcatatcttgatgtttgaggtcaaaaagatgcctacactaagccctcacagttggatacgtccttctggagactcccacttgttacgtccgctccctctatggggctgtggtgtcaaaagtaggggagatacattccttgtaaacagctataaattttgaatcttattccaaaaagcttgttactgatatcggagaaaacacaaatatgctccgtcgttgtggaatgctgtagatctgcatctcacatcagtccttgctagggactcgcagcaacccttcatcgaagacctacttcgccatccctgtgagagtatttcccctgcattttgagtagcaatagggcatgactgaagttgtcaatagaaagctcgtgaaacctgcacagcgcctcagaatctgtttgaccaaagccagcatcgaaattactgagcgctcgctcgggtatgacggtcagacttgagtatgaaattcttgcaactctgagacttgaacatggaatgcgacacgattcgtcttgaggcgtggtccgcatagccttggtcgctttttctggcttttgttcacgattcactatcatcggatatcccttgattgatcccacaccaatcattggctccaacagatatacttcatagtagatggcgttaatgcccatacaatctacaaatcatcaaatccctctctcccgaaacagccattgagtatggccggaggcctgataaaataaacaaggtaatactattgctgtttatcccagaaggagtccgaataccaggtgaagacgcgcggtagctagtcgtaacaagactcttcaccctagccccccttggccttccattccctccatgatgtggatcgaaggggctgcatataaatcccacgtaattccccagagcccagggctctgtttctctcagcatcttgtccatttgcaacaatcactcattttctactacattcatttgaagacaagtatttggacatatattcattccttctatctataacctacttaacatacatcaccattcccaatggctcgtttcagtctctccttcatctccatttttttggtccttgcggtcttcgccctctccatgcctaccaagcgtgatgagcaagctgctactcaacctttcagcctcgatggcactctcaaggaattgatggttagttagctatgtcaaagttcctatgagaagttttttattaaccaatgaactcagcatgcatctaagttgatggatggtcttgacaacaaggatagcaacgaaaaggataatgacaccgctgaatccaaggcgcagcagcagcaggccagcaaggaggaggctaaacagggggaggccaaggttgccgcgaagctggccgataaggaggcagctggtgacaagcccactgccacccctaccaagggactttcctccggcaatttcgtgaccccaactgctactcccacccacaaggcaacatctcagcctaacgccttgggcagtcttcccctcatcggtggtcttctcggtggtgctggaggcggtctctgatttaccaatgatcaagcccccatgtattaaactgaatatgagagtgctgcagactgcgatgaacgcaattctctcttggtaaacactggctggtcgatattcgcttttttcttttatgttgttttcaaggggaatggccaatgagatccttgataaatttcacgattaatttgatatgattagttcaataatttgtccgttatgtctccttcccaacctgtatttggtaaaaatgtatccttaaatgtgcttgttcaaccaaaacaccttccctctcattatcagcccatagtcgcatcatgacctctggtcgcggcttgcctgttgttgcccttcatgaagtcccgtatagtagcccgcatagtaccatgacatcatgaggtgcttcaacgactcatcttggactgcagatatatgttagttccatgaatcaccatatcccgaacgtggagcataccatttgccatgattgggtgaggcatcggcatagcaggcgtggaaaccgcaggactggcagcagccacgggttgagaaggctatatattgtcagcgagtcctttgtagaagaatacaacattaaaatggcaatatacctcgggaacaggctcagaaatctgctcgtcaacaatcgagacatcctcattctgggttttgttggcaccatcctcaacaggtttggtgctttgaatgtcactgtcatgtatagccggaacaacaccagtgtcttccgttgctctcaagacatcctcaacattttcacccttggcgtgaatgctccaataatgctgcggtcaggttagatattggtcacgtgaattggacatttggtgcctgacctggtattcttcgacagcatcgtcccaggactgaaccagggcagaatcatcccagacctctgcatgggtcaaggtcactttttttttattctttcccatgacgttgacctatttggcgttgtagtaagtaactagacatcttggcggtgactgtggttatggttgaggcggctcaccgccttccgagcaaatcagggaagaaaaaaaagtttcccgcagatgatcgggcagcgtacagtctcaattcaacacaacaaaacctcaaaatggctcccgataagagagtttcaaagcgcaagggtatgtacaatggttttggttggcgaaattctctttcctttcactaacgatactacagctgcgcctgtcgccgccgattcacccgccaaaaagaccaagaaggtcgaggctaagcctgatgagacaaccaaagaggctgctcctaagtctatcttgaagaagaatgagaagagcaccaagcctaaggcagagaaggctgctgcgccggccaagaccaatggcgagcccactcgccaggtcaagcctcgcaagcgtgctgccgacttcctcaccgacgaggagcccgaagaggcaactgcgcctgtgaaggccgacaagaaggccgagaagaagcctgcggctaagaagtccaagaaggaggaggtcgaggccgcgcccgcgcccaagaaggctgccgctaaaaagtctaagaaggaggaggctgaggccacccccgcttctaaaaagtccaagaaggaggaggtcgaggccgcgcccgcttccaagaaggctgccgctaaaaagtctaagaaggaggaggctgaggccacccccgctcccaagaaggccgccgcgaagaaggctgcccccaagcccaagaaggccgagcccgtcgttgagtccgaagaggaagatgccgaggaggatgtctcccctgctgatgagagtgaggctgagaacgagggtgatgacgaccagactgaggctctgatcaagggcttcgagagcagtggcgacgaggacgagtctgatggtgagggttacaaagagggtgaacctatccccaaggccccagataccaagaaggccgagcgcaagctggccaaggagctgcgcaagaacggcccccccgaggagcccggcactgtttacattgggtgagtttcgaccgtaattcatgatcattttgaaccatctaacatttcatttccagacgtatcccccacggtttctacgagcaccagatgaaggcctacttctcccaatttggcgaaatcaccaaactccgtctttcgcgcaaccgcctcaccggccgctccaagcactacgctttcattgaattctcctcgaccaccgttgccaagatcgtcgccgatacaatggacaactaccttatgtatggccacatcgtcaagtgcaagttcgtccccaaagaacagctgcaccctgagatttggaagggcgccaaccgtcgcttcaaggttacgccatggaaccgcatcgagaagaagcgtcttgtgaagggcaagacacgtgaccagtggtcgaagagtatcgagtccgagcagaagaagagacaggacaagcaggagaagctcaagaaggcccttggttacgagtttgatcttccccaactgaagagcgtcgacgatgtccccatccaagaggcccccaaggctgtcgaggccgctgagcccactgacactgccaccgaggagcctgccaaggccatcgaggcccctgctcccgttgaagcccctgttgaagctcccgttgaagcccccgttgaggctcctgtccctaccgatgatacctccaagaaggtcaagaagggcaagaaggagacacccaaggcggctgctacagagtcaccggctgctaagtctcctgccaccaaggcgaagggaaaggtcactaagaaggccaccaagacaaagtccaaggcgtaaaagggattatctgaaaattgtttctaatttcattcatcaagcctttttccccaaatgcattgtgtttttttcccttgatcaataaatttctttcagtattatcattcaaatcctaaatgcaacaaaagtaaaagtatggtagtcgttgatagggatgccggttgaaaggacttttctcttcgccccaggatattatctctgtctctctctaaaacggtaccttcctgtcttccgtagcagtattaaaattagcatttccccaggcgtttgtgctcgatactttactttctggatatattccttcggaacatagccctaagccgatgccactcgcgctagtctcaactaagcctagcatacatcacctgaccagtgcgagaaaaaataaaaccctctcctcgaagattccacttcttctttttcttcaactcctcgctcaaagaatcgcattcaaagctcacacacaaaaggaagcctcgctcccttttcaatctcgctttgggagaaagtccccggacaccctgcactttgggtaaaaccaaagtaccaagtcaggcaatgcggaaacgcgccgccatagaagcaattcgatagcggcttacgccctattctctcacggtatcccgtgccacccgacggttacatttcacgatgtctctggaaacaatggggtgcgtgctgggtactggaggggggaaggattggtggtcaaacaccttttcttgtattgggttgcctttcgtcatgttcggatagtcatgcgattgcctcctgtctgcttctttggaagtcgatggaggtaactcaatggggctcattcttgaggcgaggagttccttgatcttttcttttcaggagtctgtagcttatggcaaagcggtgatgagattctgtctcattgcagaagccctgtcacaggggccggactcttatatcttgccataggcttcgtttttttttgttcgcgtgatgatataccaatcatagagtcaagcacagagatcccaaggggttgttgacgataaacgatttaaaattatctgatgaacattctacatagccagcttttcagttcgaacagtttccaaaataccaatgcaattgaaatgaatgattaaaatgcagtattcataactaaatcgtagaatttcacttcgtatatataatacagccgttctacatgccacatagctaggctcttgttttttttgggggggattttttttcactgggccttgatgccctcagcaccgacaggcgcatcctccttgggttccttcttctggccagccacctgcaccagcagtgctcctacaagctcggcggcgaacgcaatgctagtcgcacagacattgctccatacctggatgctgacggatccaagcggggcgcgagggaaggacacgatccattcaacatagtaggggaaccaagcctcgggaagcgggaaaacaggcgttttcgagtaccagaattggaggaacatcttcaatccgtttgtgctgatccagcgggcgatcttgacggtccagtcgaaggaggactttttagaggtgagggtcttgtctagaaaccaaagtgttagcagtctgctcaacagatataacaacgtctcctgtagtcttgtagtagtgacacgtactcagcgcttcgtattcctccatagtcttgtcgtgtcgtcttctagccttcgcccacttcgcaaactcatcctgggagcttgtgctgttcatttcgtgtttctgctcgaggacctggcgcttcagctcctgctgcttccgtgcagtccgcgaggttgaggtcggcagttttagataaaggagccatagctgtgttgcaaagagagtaggtgttagcgtgtggaattacaatgtaggtgcgcggcggagctgggaaactatgccgaggccagagatgggtggattggagacatacaagaccatcgacggtactcgcgccgaccgtattgaccaggaaaattgcgacgtgcaagaaaaagactgtgaggacgagggacaacattgtagcggggactggcaagaccgggatgaagcgttgaatgcgacggcgcaggctaagggagcctggaagatagtgagagcggcacagtcggccgactaagtgagtgtctggtagctctgctggatgagattggaaatgtcctgacaagatagatgtggttgaaggtgtgaatgacgttgtggaaaggtggaaataacagcggactcggcctttccgccttcacagtatcacgcactacaccatcctgtctatcacgttgcctatagcatggcaagacaataaaatacagaaatattacaatcaaacaaaatatgatgaggctttgacggttgtacctttccatattcgccaaacaaccaagccctccgatgtccaacccgaaagatgcattccaggaacttgtccgcatcttctcatctagagacaaccaagtcctcgagatcgagatccttccatcaagcctaggcgttccgttcctccaagatggatgctcagtgggaataaccaagaaggtgctagtgcaggccttcacggtcgcgcgccaactcttcttcgaccgattaatgcccatgtccgaagatgaccttcaaaccacctttacgacaaacgcccagtccagaatcgcagactcggctattacagaaatcatgctcctctttgactgcgagcatctcacggcctgcaactggcgcaagcgccgactgcaggcggccatggcctaccctggtatttcaaaccagacctctgccgcagagttgttagaagcagaactcacgctcatgtcgagctaccaatgctcgccactccatcgacataccaagtcgccgaccctctggcatcaccgcctgtgggtggttgtctatctgcttcaaaaacggcattggggtcttgaggacctgtctaagctgcgaaggactgaactagatattgttctccgcgctggagagctgcatcccaagaactattatgctttcagctatatgcgacagttggatgttcttctcgctgctacagcgaatacacctgggcaatcgacatgggaaacccattctgcgcagtcagttgtcgaacgggtggttgattggtgcttggctaacccacgcgatatatcgggttggagcttcgccctctacatgctgagcaatgttccagagcaacagaatcgagccaacgctcttgagagagtggtcaagtttgcgcttaacgttggatgggaaggcgagagcctttggacgtttgtcgaccaagtatcgaggcagtttgggcttgaaagtgtgatcaaagatattattctgttgcactgcgatcaagcagccagacctcctgattgccaaatggttcaagacagtcgacagaagaagtcatggcagacctggctagcccgggcgagagtatgttgggtcgtagatcaagggcaagatacataaccggatatgatatggatgtatgtgtttacgcgtttacgattaccaccaaattgcacctccatgatatttctcatgtgtcgttgcctcgtttggttagcgctgtggtatacatgtttgggctaaatatgataaacgccaaagagattcaaatgaacgcctcgctagacacccagcccccgttttttgaaaatgggcataggcggatggttccgatcttatccataaatccagcgccgtccttcactcgtagcacactttgcgatgctgctcggtgggttgtccgtttcgggcgatcgcggaaaaggtggagggagatgagattgactgacggcttggatctaaggattcgggcgtgttattttttcccgcctgccgctgcctcggcagctctcttctcgtccgctgtagaagagaagcgatcagtaaaccagtctcatgtgggttgggcttgcgtctagcgccttcaatgatacacacccttcctctgcttctcgcgcatgatggcagcggcatcttccttggccctcgcgaattcgctaccggtctgggtattcttgttcttctgtagaaatggtcagtatgagcaaacagaagggggagataagacgaaccgaattgcccgccttcttcagggccttggcccgatcgttgtcacgttggttaccccgtgtcatgttgtgtgatggtgagattatcgcaagagtaccgagagtagtgagcgcgaaacgtttggagagtgagagaaaaaagtttggaggggtcggctggattccggcgaatcacgggggttccactcatcgttcagtataccttcacttaattgactatcgtgtttaccatcggagtaattcttactattttatgcctattggctaatttgatcagcgactatgtgatggctatgattgggctatattcttgccttgtttcgactctggctttatacttcaccctggcgcttcgcctaaaagcccctgtctaacaaccatatgctgtactcaccttggtacacgtacgatatagaattctttgaactatacccaacaggtaatcaggcttgtccgagataagcagtatatttctcctccgactcatattgtgcctcattttctcctcgtggtcactcgataagatgagacggagttccttgcctcctctccccttagcgcctagagaggcatgttactgcatatcctggaacattcgagatacagggagaacaaccgatcttttaggtacaaaagaaaacaaaacacggggaatataggggaaagaagggtgacttgtagccgccaactcgtttcagcatattcgaatatcctctactaaccaccagtcatttggctacaccgagccctagttgagatcccaatgctggaggagtaaataactagacttattctggctacaaccccgatcttgcgcctaagggtccctgtttattgcctgaatcgcaccaatgaactcctgcaggatctctcccactgcagagatggggtaaagagaaccctgccgatctctttgaccaggactctaattagatgcgcaccacttatgtggttcacgcagacgtttcaagtctattcatagaaaaaaaataccatcgcctttgttgggagtatacgtctaggctgctacacctcaatagccattcttccaggtgtttctccattgtcgcccccattcatcccgtttcctttgtctttgtgtttcattcttcttttcttgtcctcgagttgatctcgttatattgcattgttccattctttcttggaatatcaagctttctgctggacagtcgctttcttccctcttttaataccaaccttccccccaagtctgctagcagacatttctcgatacaccctcggcatcgagtatctaccattcttaacaagtgtagcaggctgtgcctcagttatgatggctcatttgcgtgaatccctggccggtccagggtacgtgatcctgaacgtcattcgcgttctcaacattatcactttcatggaccttatagctgcttgtgcagtacttctggcaaagatcgacatgctgaacagcttctttttcttcgaggccgtgacccacgccgttgtggctctggtcagccgtaagtataatcttccttttgtgttttcgtgatataaatgctaacgttggcagtcttcatgatcatctcggagctcccaatactccaaagctatttcgaccaccactggccgatgttcggacaagaatctagcttctactctctcggtgggatcatgatgatcctgggagtttcgacactgggcaacctgaacaccaaggctatgacccaggaaaacattggcctgactttctggagaatcatcatctccgccggcgtcctggcaatgatagttagcgtggtgaacgttctggcagtaagtatcgagatcaaaactcccagcgtatacccttgacccaatgctgacccatttccccaacagagctacatcttcagcgaccccgagaccggcgtcagtgcccgccaggtgcgggtcgacggcgctgttgcaccgcaaaaggcaatgagccggactagcagccaccgcacccttcacttgagcgtgaagcgcgaggaaaccctgcccacctattctcgccaaaaccccgtcaagcgtgccaccaagcgtctcaccggccgattcccactcaagatctccaagcccataagcccgacgcttgttgaggagaacgatgctgcttcctccaagtactctcgtgattctgcggagatccgtcctcccgacctcgcacaccaccctgctctgtactcgggccatatggtttgagccggttgcctggtcaactcggttgagaacggcgtttggaaggaaaggaagaaccgtgctgattgagtcagaattcctgcgttattgcgatgggcgcacccggcgctgttttattacccctggtctttcgcttcggcttgctcgtgtttaattgatttaattgagacatctttttttatgcagcattcgtaggatttgtagatattaaggatagatttgaaaggtaaatattccaaaattagaagagtatggagtagaagaagtgtaggttgagagggcaatgtctagaaaggacgggacccacgttgacgtttggccccgacttcaatgaagctacgttggacattcgaacactttaacacctttctttcttcgaatctcgactcaacttgttagagattccgatgaagtaaggtccatatcatagcaaatatggctccaatcgcaatttcctggggaacgtaagtcttgaagctcttcacatcctccgcaatctattctgaccgtgaatagcgtcaaatcagtcctcatatttttcgccccaatcatactcccacgcttaatcaccgcctatcgaagtctgcgcgtatccatcgcgagccggccaccgccgcgtcctctgcctgctgcgcccggtcgagcgctgaacatattattcggtggcatcgtcttcttcctactcctaagcctacccttcaacccacacgcgcccgaacccaacatcttctctcagactcgctctcgtctaaacacccctaccgatgtcatcttcaaccgtctcgcccgccttcggccagataacttcctcaccgaagccgacaatctcctccagtccaagttcacctctctgggtgcccgcaaggtatatctgacctatggccccgacgccttggtctcgtgccaatactgctcatttgacaacatctacacatacctcctctactacctcccattccacgtgttgttaccacacttggcgcacctgctgctcctaggtgtagccacatccgcgcccatcgcagggcgcgaggcttcccgctggcgcatcaagttcaccctagccggacttgtcctcgcagccgtcgacatctacattatggccacctacgatgcggtccaaagtgcgccacgctctgtgcgcgcgggccaaacaccgccctccggcatctacaaccatattacgctcctgcgcccgctggcctttgtaatctgcgatgtgatctgctcggttgtgctctggctctccgcgactaaccggttctttttcaagccgccctcgaccgtcgagcagattgacgaggcagtgtcgatggccgtgcaaacgctcatgggcgcaaactcgaaactccatgccgcgagtgttacccgcaatgcggtggttcgggattcgactttgaagaatcgcgacgatttgtattggcggactatggtggcttccgagaaccccactcaagggcctggagaaggtggggagcagatcctcaacaatatatgggaggaggaagaagttgctcgggctatgtcgcgggcgatggccggacatggtggaattgatttggctcaattgggggtcagtgccaatgattttgtgcgacacgttacagagggattagaatgaatatcttactctgtattcaatataatcgtacagcgtacatgtagatgtcattatcccatttctcctctcccctgccaagtgtcaataaatagaccgcaaatggtaaactgttgacaccaacatctatattcccagaattcaacaaaatcaaaatcaaaatcaaatctccaaatctcattccaatctcagctcgacaatttacgtgcatgcacttccatccaatcaacaatctcgacactcaacatttaacgaggcggtgagtggatgatcgtgaagagatgaaacgaaatcaccacgttccccctctattccctctcctacaaaaacattttcttacactcgcaagctgttgcttttcctgttcctggttgaacgagtcaagtcaagaagtaaataagggcttagatgaggcaggtcccacatctatttcagcattgatcactttggcttgattccccgttctcgactccccgactcccccgactcccggccctcttctccctcggtggaatttcgaatctcctccacactattggtgctctctccaccatggcagacacaattgtgccgtcgaaacaaatatcagagctcaagggacgcaatgcctacgtttcctctcctagtggtttacgaccggccaaggagaccacgttccgtgaatgggtggtcaccaaccagatcggtatgaagaaacaccccggtttttgaatttacatgagaatgaaggaaaagcaaagctgcacagagccgctgcgcttctaattgaatcccagcacatgcgaaatctaatacgagtaccgctaacactaattgcttctctgcaggcatctcgttgaccactctgtctatgttgctggctcttcataacctctacccttcactccgcccatatacccagccattcttccaattgtcctattacaacgaatcctcggactcctacgtccagggctgggatgatgtttacttcgtcatcagtgcggctatcgcacttaccggtatccgcgctatcgccattgaatggtgcatgcaaccattggcccgcgcctgtggtttgaagcgcaaacaatcggttcgcatcgctgagcagggttggcaagctatgtactattcgttcatctggggtgttggattggtgcgttcggcccgagatacctacccgggaatatataactaaccgctggttcgaccctacagtatctctggaagacgtcatactactggggcgatttcgccgccatgtggtcgcagtggcccgcccgtcctttgtcgggcttgatgaagtggtatcttctcgttgaactggcattcctcgtgcagcagatcttcgtgatccacgtggaagagagacggaaggaccatgtccagatgctttcccaccacattatcacctcggttctcctgagctctgcctacatctacgctatgtacaatgtgtccaatgtggtgctatgtctcatggatattgtggacttcttgttaccggttcgtcacgtactattcgccaagcgctgaacagctactaatacctccacagtttgcgaagatcctcaaatactccaagtttgaaacagcgtgcaatgttggctttggcctcttcatgggtacatggttaattacccgacacatcatctaccccatggtgtgctggtccgtttattatgatcttccccgccaacttacctatggctgctacaccggttcgacaagcgagttcatctcaacagaggcgccggattccttcgcatacatgttcggtccatacttcagtttggacaaccccatctgcttcaatcccgcgctcaagtggattttcttatcattcctgttgttccttgagggactgtctattctatggttcagcatgattgtccgtgttgcttacggtgtgatttgcggcggtaacgccgaagatacccgcagtgacgaggaagacgaagcggaagtcgaagaccagcccacatctcacgccccagcgcacttgactgccagagacggtgcccctaccgacgcactcgagaccggaaacgccccgggcttgggtcgtcggcggtccaacggcactgcctcggtgcgggcgcgcggccgtggtcgtgttcctttcgatccgagtgatcggaaggctctcttaggtcggattggatgtgaaaagcctacgtaaatgccggctttccatttatgattttcctttgaccaaaatttgatgactcccatacgagttgctccatagcatgccatgcctttgtcacataccccatgccgagatgtccatttccgggtgtcggtgctggccatgcaatggagtcccgaattacgatgaactgcgatttccaaggttagtttgcggcacatccttcagtctgcttgccgggtcttatatccactttgtttttgtttttttgatttcttattcatactcattgtcatgtcgccatttgccggctggtgtcggggggaagggggggttggggggtttcctgctgcgctttttgttgccgtgatgatctctacggacttggagtttcgctctagagatccacacaataataaccaatgaagcatttggccttgtacatgtattatagtgccctgtccggtacggacttatagatttttcctagagtgaatacggaatccagcgttgccttgaacaaccctaatccgcccatcacctagtatatagcaatctcgcctagtgaacatagtccctaagcggcggctcctcactcccactatacccaaacaacaacacattaagcaccccaaccacatccgacacagcctccatgcccaaaaagtcatccacatccaaaccaggggcaagcgactcaccacaaacagcatcaagatcaatcctctccaacttccccggcccctcatgaaccaaagcatcaacaaacaaagcatacgccaacggattaagcaacaaagacgaatgcgaatacaaaccgccagcagcacgccccgcacaagcaacctgcacctccacattcgacacgcccaccccacgcacatccgccaacgccgcagaagcccaccccccactctgcggttgcacaatggcgtcatccccagagtacacgctggtcgtcggcacaaacgccgagtccccatccccaccccgcagagcccgaataaaccgcgcatcatacccctgctgctgcacagcgggcgtacaaaacggctcagcgagcacgcacagcgtcgcaacaagcgtcccgtggaaatcactactgacagccatgaaatcgctgaccgcggcctgtgtcgacggccagtatttcagcgcccattgtacgtctacgctgccttgcgaccagcttagtaccccgatggtacgccccgagagtccggagatgtagtttatcgcgtacgcgacgtactcggcgttgctttggatgtcgcctagtgaggtgtctgggatgttgacccatactgggtctgtgtgtgggtttgcggcgaagatcttcgcgtagttgaagtaataggtgctgccggctgggtcggcggtgccggggactaagaggatggggattttgttgttcttgccgtaggaaaaagttgtcgggatgtagattgcgctgcggagggtgtcttcggggatgtcgtagggtgcgtccccgaaggattttgttgggtggattcggggactaggggtttttgtgttgttgttggctatagagtttatttcgtggtttcttatgccgtctattatgtcgaggatggttgttgggactagacctagggatactgtgtcgatggcattctggataattgtttggttgttgtgtggaattgaggcgaggaccgagaggccttctccgattgttgagacgggcttgattttgcctgttgctatatctgatatcttggcttcgagcttagatagattttggtatatttctgggctgaagggagcatgacttgtggaggtgttgaatagtctgttaaatatatctgagacatcctgggcttcttttaatatgtatgaaggcactgggctgccgagtgatgctgatatgaagagaacaaaccgaaaaagctgatagcagtgcattgtgaagcttagctcgattagggctgactatccacccgcgggggtgatccggtgaatgctgacattttatacaagagatatttcatcggagctcaatcatcatcactttcgtactatattcatggcttattagatctgagtttttatttcagcgccagatacacgtctatgtatatcggattccacacctcatatttcggggacattcaacgcaccgtcaatcttttgaacgtttgacatggaaaactctaaagtgcagaggtagtcccccataacgtccgagcaccggagtttcttctgtatctgtgtatcccgagatatataaatcagcccgtggagggtctgctgctacctccttcagaaggataagatcgacagtccacaccgacccatgactcaataggttatgaccaaaaggagcctatgttcaccgcaattgcatctcaagccgggaatcattcctaatctgttttgtgttgcaatttcacgtgtctccgccgaaaaaagtacaaaagcataacctggactaacttcagtttgaattcaaaacgaagaacactgcataaaattttgtattaacatatcaatcatccaggaccatgcacgcgactaccatagacgcgaacatgcctcctgtgggggtatataaatcccggggtctatttccaagatcccggcctcgagcttccagctgacaacttttgtcccacatgttttgtaaatcaacagcggattgcaactgagttgcaagatattcctgcaactcaggcacgggtcgtaacgagtaaggggcttcttttaaacgctgaatctcatggatggttgacgctagcatagtatatttttggaaattgatgagcccttccggtgtcatggctgggtttccgtcttcgataaatgtcaagtctttcaagaacaatcctgttgaatggttaatcatcggcaatttcaacggttcacgagagaactgaccaaggaaaggcacgcacggtgccattgcaacccgtaacgtgtcacggtaggcctggtaattgtgtgcgctgcatgtcatagcttgcaggggccttagagtattgcaactacgttcggtaaccattgcccacgtgcgggcaagccggtagatgggtgcgctttccatgcctgccaggatagagattaccgcggagtaattacggagttggtgacatgtctggaatagaacattagcatattggaataattacaagggtcaggctagagattacaacgtacattggccacattgaccaaatgccctatcacttgggtccgttttttcacatccgattctgcgagtattagggtgccgacccaattagagagctgattggaataccgaatcaaggctctgatgtttggagctagctcgggcgtattggagctgtccttcatttgccagtttttgtttagcaattcatctcgttgtactttgccgaacatatgtgcttccatgatagtcagctgccgcgcaatttccgttgcatcgattttgaggaattggagtttgtttaatttgcgtggtagaataggttttggtgggttggatattgatgatagcgatcttttgtggcactcgagacccgcaagtcggcgctgaatgactgtgagaagttgttgtacggcgcttgcctcggtggcatccgtggcgcgcttggcgaatgactgcagtattcgcaaattttgatctgtatcaatgccttttggctcagaccagaaatgttcaagccattgcttcagaacatttatcacgcgcaatcgtatcagtggctttatctgggtcgtccattctgtcgtctgggtggcgtctaatttgggaggcgagcagtcgaatcgatcgatgaggagctcaataagctctgctgcagaggtaaaatacttataagtggcgaggaagactcgattgaaggcaccgtcgagcttgtcgtggtgcgtcagattttccaccagcgctgcgagggttccggccctaacaacctccacgctgccctggtattggtagacgagtttctccggagatgtgatgtcgtgagatcccgagtccctccgctcttttgtctctgtctgatccatcgcgacgggacagccatggaaggatttaaatcaggtgtcattcgaaccgcacggtcgctgtggtcacatggcattgtgtctgaactacggtcgaggcaagaccgagcgattgataatgtttggctagtggggtactcccagcgtgctaacgaggcatccacttatagtactcggtagctctcacgttaatttctggtcctgcgaaaaaccccgaactatcatccgatctcggatacgatcagcaaccgatcatcggaattttgcttaaccgcccctgccacggaccgccgctaaccgctttgggccacgatcggagagttttgagttatctgatccgaaacttactgagaaccttggacgcgacatgtttattggtagacagaggatccgccgcgtcatttatttctctctcgtgccacgcggtcggagcccacatgtggaacttttcaaggctgaggccgtttaactgttcacgggatttatttgttcccgactactgtagcaaaaggtggtgggtatcattcagggtcgcgtaaaattattatctatactggttctaaaagaccgtgcccctgacctgccgctttttcttcagattgatatcctgcatcaagaatgtccaaggaatcgccagaactataatgccagtcccgacagaaagtagtcgaagttcggcgtaggcataggccttttggatagcaaacctggtggcagatccgactggatagctcagttgcgtgacgagatcctcgtaaatattgttcaaatttgacaattccgattccgggaggtatcgaagaagggctttcaggtatgtgttttgccagatgacggtactgatggtaagacccgcactatcgccaatagtgccaaccacgtttaacacggcgagtgctgtcgcgacatgttggtggtcgacagccgctaggatagcaagctgctcaacaaggatgaatgttgcaccaccgatagcgaggaagatttggcacatcacctggtagccaacattcacattaggctggcggaagtatatcattaagccctgtgccaacatgtagagcggaattgcaatatacaaagtccacttgtaacggccaattctccggattagccaaccagtggctagtagcagcacaccagagaccatgtcgaagatattgacgatatagttggacgtggtgatggataggttattgttgacctgcagccaggacgtgaagtagtagctccagcaatagttcgacagctgataggttgcgtccaagaggactgcaccgataatagtgcggttcgtaagaagtcgccactcgaaaagaggcactggagccaaccacctctcccaaatagcgaagaagaaaagtgtgcagaacccgacgacaagcatggcaataatgtagccggaagcccactcattgggggcgtaatgggcgaggtcgaagggaagctcaaataacacaagaccagcagtgaacaggaagactccaaagactagttactcccagttagagtttgccctctttcgtaaaggataggaatcaacaagtagagaacttacgatcaaattcgacagtccaatgctggatgctttcgaataccgtgcggccacttggtctcttgatccggtagccttctttctccgccttgtgcaggttgtacttcagcataatgtatagcggggcagctactacaggaacgacgattgcccagcagccaaagccccatttccaagaaatcttgtagtagaattcgtccgccaccttgggtcccgcaaatgccgtgataatgtatggggaggaagtgaacgcatacgcgaaagcacggtttctcagtgttgaaacgtcagctgtcataacgtctattgcgtattccataccgtagaaaccggtatagtagaagaccttgtatgcccgtcagcatccgtattcaacaccatgacattcttagaactcacgttggcggcgcagtagatctcaaaggtattgcaggtagccatgagaaccaagccgatggttaaacatataaccatcaacagaaacccttccgctcgaccccatacatccatcatttttgcgacagggaggtaggtggcagctgcaaagacatcacccagagctgtgggaaccgcggatagcgagtgtgctttgaatgaacttgtcacatagggattcagagtaacggtaatcgtagattgaaatgcattcgcgaaataaaggaaccagatgctattggggccctggtattagtgtatgcccgaacatttgtcaatggtatcggatacgcggcacaaaataatacagggaaacatacttgatgaagactgcgatcaatgtacctctcgaccaggtcatggtcacggcctcgacgtcttgaacaccatgctgcgcactcccatccggtatctcctcgagtgccacagaactggtgggactccgagtgccatctttacgatcaccgatcgtgttctgctgtgcgaaggagtcatttccattgtcttcggttgacagccggcggaacacgatacgtgctctgcggattaaagggcgaacacccataatggttgactttagaagtccaaagttgatcaggttgcactacacgtgaaacagtagggaatcattgcccttatagtaaacaagcaccgaagtcgggtttcgtatttttacggactagctggaagccaaccagtcaagtactctattcagcagggttgtggagattcaattgaatcatccccgagccctctccactggcgcttaacagaaattcaataaaaagaaaaagataagatctttcgtgctcgtgcgtgcgttcgtgggccgacccacgccacctttccctcgtcgatcggaaattgcacatcgtgcaccgagtaccgagtatccactgctgaatcctttcgatcctatcacaaatagttacatgattaatgcaaaggcaggaaaacctaaatcggggaaattcaaggcactttatgtctaagcgaggactttttcacgtaacagtttcgcccccaaccgcaatatgtacctcgcttctctagactctctgccaagagttgactaggcgtatagagccgatgaaataatgccattctatgaaggcattggctgaattgtgtgtacctgagcgtggaatatcgcatcgtttattttatttgtcctcgcctacctgccaatccttgtgcgacttccacaagtaccggctaattggctagtgtcgactatgttgctcccaaggtttagttttcaaaagggttagtcacgaggacaaatgaacattgcccaagctagtcaacaaagttatggagtcatggacctgtgtatgcgcgttcacagtcatatgtgaccatgttcagctcctagtcggattcccggatgatatcttccttttgtttgaaaggcagagaggaatatcgaaagagcactccgagggcaaggaagagcttgagaaattagctttcaacacatcccatataggaccgagttatgtcatggccgtgaactatcatacgttcttccagaatcttggagtcccgttagcctccggcggacacacagaatgggaggagtcgaaaggaacggcgaattgcaggccgaaacgcttttccacaatgacctgaaggacatcagtccatcggactgtccgtgtggtacgtcctcataaccttaacggtactattgtcgtacatttgttcatatcggaggaccgttatcggctcacatcaagtatagcgttcagtagcgggttgtagatgaggatgtcgcataataaatcttgggcgacaacaacaatatcgaaggcacttggaaatgaggtaccaacgtctcccatagtcctgcttcttgagaggccaatagctcgtcccgtttcatcgagccagcgagctgtatgtctgcaaactttcaaatctcctcagatttcaatatcggaaaggcaccaatacttggagagtatcgaaagcttaaacatggtatcgcacgtactttgaccatcgttggagatggattagattgtagtgagaataggacagggcaacagggaaagtagttgaaggaacctgtaaaagtggaaagagaaagcaaagcatcggaaatgcattaactacaaggaattcacgacctcaagtggccttcgtggtagaggcccaagtaagggaggcttggtggtggttgccgtatgtgactcgaacggttatggatagaggaaggaacgccggactccaataaatagctattatatgtacttttgagactatctgcatcaaatggaccaataatacttagtttatatggacgaatagatcctatgatcaaaagtcaagaggaacgtattggtataccatccgagaagcatctccagtcagaccacggtcaatcctggaaacccccagaaagaattgatcagggccccggttccacttcgcgatatctgcctctgtgattccaggaggaaacccatctattggccgaaaggcggaaatgggtccaatgcgcacctcctccgggataagcagtgctgttggtattctcggctccatgtccgcacgagcacaatatgagcttgcagcaagttcggaactggggattggctcttttgtggactccagtacacctaagtgaggtggatgatgggctgcgttcatttccattgcttgtgattcttctagctccatgattatttggcccacggcggcccatatgtggcactggtaaaaaccttgcactgagggtgcttgacggagtagagccagtgccgcgcgtcggatacgcggttcacggcatcgaagacttgtgaaccaaagcggaagaccgatattaatgtcaaatgtaaatggtggttgggtgccgtctgatcgcaccgaggctttaggggcaatagcagattgttcaactatatttcggaagtttggtagataagcgtcgaattgcatcaatgacgatgatgtgcaggtctcgagcatgacatgtaacatttcatgacaactcaacagaagggcactaataccaatctcttgcggcgagagaaggtctttggcccgaaggcttgtcatcaacttatcaaacgcagtatgccagttcctcagtcgggtggccagactggatagtatagtattgaattctccgggtagatgatagacatgagcctcgtgtaagtgcttggtgcatgttgcttcgaagagagggatctctacagctaatagcccgatcgcttcccgagcagatttgagtgagtcaaaccgttccgttgagaaatgctcggtgtcttgtagtaaagccgtcactggagccccacggacggcgagagcaaatgttcccaaacggatgaagaccgggataatagtatcctccaacaaggaagctttactcgtagcactagatgctatttgggaacgcaaagcggtaatgagctgcacaccttgacgataaagctgcaatgccccgtctgcgtttccctggatggcctcaatgcagatgaaaagcacacagctgatcagtccgacaaagaggtctatgctaccctgctcaatgcgctggcgaacagcagataccgagcgtgagtaccaacccaaggcatctgggttgtttttagcgagagaaataggattatcacggcgttgtagcataggtcctgagctttgttggggacactcgaatagggcactaatggtgatgatggcatcccaaacagcgggttcatagcggcaaacttgtgggacggtagtgcgccagaaatcaacatccaatccaccaccaatggaggaggcagcacattcgaaataatatgcaaatgcacgtcgctctcgccacaccgtattggtgtttgctgataatgacaatgggttgacgatgagcgaaattgtggaagaaggctgtatgccttcaaagtcacacttgcgacctgtactggtacatcgaacacagctaggcttttcttcgccgcatttgactcgtcgaattctacgacacgctcaatatcaaactctgtctatggaaaaggaagcaagcacctacttgcaagtcttgcatcctagccttgaccttggaaggactcctaggcgacgcgttgaatgatttgaaggaacagacatgttgtagcattctagattcggcttgcgccaacatatctcaacgcgcatattgatcaagtgggccgttgtcacgtgcctgatcacgagatcatggtcggcctgattcagtcgagcatttccgggaaatcgtgagaatgaggtcgggatcagatgggaatgagatgggggaaagagagctgactaggtttgtctagggcggaagtcaagcctttcgctttttggaaggagcaggacttgattgagagtcatgacagtcattgattattctgttttgttctgatatattacacctagctagggatatgggtattagtgggcttccgtgagctaggtccatgtctcggacacaggcaacttatcacgaccatgaagttgcccagcttatccaatttgtgaccactatgcacaagatatcattgcgtccttgtcccaataatctgcgggcgatggctatttgcaagaggtgtgccatagtcagtagtcggtgggcgggaatgaggtccatctctagaattcgggaacgtttgaaagtggatgtgtagtgaagacaagctaggtcggctctcaaccagtattatctctgagcctggcaagtgctgccgcgataccttcactcatctcttcacttggtttattttcagcctgaggctcagtagactgtgcagcgtgcgcagctgttgttttcctgctttccgctaaaacctcacgaagaatcgcctcctcttcatcctcttcatcgatatcctggtcgtttttgtcatccacattcacggctggcagtcgagcccgaggttttatggcaggagcagaagcccgcttcgcactctcgactctgaagtcttctcggactgcatgacaccattgttggacctttttctctccccaccccggtacagcgctaatctgctccggctgtgcatttatggcattttgtaaacttccgaaggtggagatcagactcgcggtatcggacttgttgatacttctgggtactgtgacaaactccaccagcgattctttatatgattgagcctgtttcgctcgaatggcggtgggctgtgcattctctgaggacttgtaaagctcaagataatgcgcagcctctggtgcggaccaacacaatatcaaggtcagattgttgatgatggatgttttggacaactctcggagattgtcttcatggtttggtatgtcgaccatcaccagtacgaggcggagattgtatttgcctgctaattgtttcactcgggcgtagatgtattcggggtgtaggcgatggtatttcaaggagagaaacattgcgcacgttgtggtgccaaccacataatctgcgggaatatcggcatactcccatggtacgagctttatatgggacaggatcgggttgcccttttgtcgcgcggacaccagaattgcggaagtagtaggacggttggtaagggcttggggtttcaactgttgaactttcggccttgacgattcacctggagcaggggagtccagagtcgcgggagtactagggcggttggcaagggcttgaggtttgagctgttgaactttcggtcttgaagatgcactcggagcaggggagtctaaagggcgagaggatataccactcttcgggcgtaagggatccatcgtgtgttgtttctaaaggcagagcgatcaattgagaggtgataggtcgataaagctattgcttatctggatgggacccacaccgcccaggccaatctgcctcgcttttttctgccgctaatttttttgttcttcccagaccgcagaaaaaaatcgcagtcgcaagaaagccaccatggttgaattacacaagaaacgacgtctctcggacgccgaaagcaccgaaatcaaagtcgaagccactacacccgccgccgaggccgcgtccgcacagaacaagagaactcttttcgtccgctcactacccacctcagccacgacagaaagcctcgcagaatatttctcgcaatcctacattatcaaacacgctgttgttgtctgcgacaaagagacaaaggtatctaagggattcggttttgttacattcgccgatgtcgaggatgcggagagtgctctgaaagaactcaatgggtccaagtttgacgggaaaatcattcgcgtcgactatgccgagtctcgtaagcgtgagatcgatgagaaggttggacgcagtgtccccactgctgcatcccgcgaatccaagaagcagaaggaagaagagagagggcagggtctgccacccaagctgattgttcgcaatctgccgtggagtgtcaaggagcccgaggatctgaatgtcctgttccgcagctttggaaaagtcaagtttgctactctccccaagaggaatggcaaacttgctggttttggtttcgttaccatgcgtggcaggaaaaacgccgagaaggcgctccagatgatcaacggaaaggagatcgatggacgccaacttgctgtcgattgggctgttgagaaggacgtttgggaaactaccaagaaggaagaagacgacgacgaggaggaggagctgaaggaagagaaggagtctgatgatgttgagatgaaagatgccgagggtattctggaagagccctcagacgacgaaacctcttccgacgaagatgacgaagacgaagaggacaatgacctggatgagctggacgacttggacgatgatgatgaggcagacgaggaggatgaccgaaatgccactacagtcttcattcgcaacctccccttcaccgctacagatcaggccctctacgaccacttcaaaactcagtttggcccgctacgatatgcacgtgtggtcttggattacgagaccgagcgccctcgaggcactggatttgtctgcttctggaagccggaggacgccaacacatgcgttcgtgaagccccccggggagccgaagctatggccccgaacaaggacaagcctaagtcaaacaccgctatgaagcactccgtcctccaagatgaaaactccgacccaagcggccgctacaccctagaaggccgcgtcctacaagtcgcgcgggccgtgagcaagggtcaagccgccaagctggaagaagagggagtatcacgccgtatggtccgcgacacagacaagcgccgcctatacctcctcaacgagggtacgatcccctccaactccccgctgtataagaagctctctccctccgaaatcaagatgcgcgaggacagctacaagcagcgcgagaccttcatcaagaagaaccccgctctccacctcagtctcacccgtctcgccatccgtaacctcccccgccacatcaactccaaggacctgaagcagcttgctcgagagtccgtcgtcgaattcgccaaggatgtcaaggcgggcgcacgtcaaccgctctcaaaagaggagcagcagcgatcccgcgatacaatgaaggagctagagcagctgcgcaaacaaaagaagatgggtatcgtgcgccaagccaaggtcgtcttcgagactcgcgagggtaccaaggtctccgagaagaccggtggtggtcgcagtcgtggctacggattcatcgagttcttcactcaccgtcatgcgctcatgagtttgcgctggctgaactgccactccatggcagtccctccttctgctcaagctcccgatgaccgggacaagaagaagagccttgttgttgagtttgctattgagaatgcccaggtcgttaagcgccgtaatgagctgcaagctaaatcccgcgagcccaggcccaagcgctcggatgatgccgaggacggagagagaggtcagaagaggaagcgctccgatactcgtggtggaaaaggaaaggatggaagggatgcacgaggtggccgagatggccgagatggtcgtgatgccaagcgcggcaagactggaaatggaaatgcaaagggccccaaagatgaaaaagtgacgaatgaagaggaggacaaggccgctaagcgcaaccgcattatcgggcagaagcgcatgaagcggaagtcccgcaaggggaattaaaggcgtgaatgttacatgtttacttgtttaatgtataggcattatttatcccggcattcagagggaagaactgttcttttgtacctacgcgataccaccaatttcgaaaatgaaaagcatggatttatcacactgggtatataatgtcgtacattctatccatgcaaaggcagccgcttaatggtaatgtagcccttaagtattcttggcaccttcaactttgccaacgatgttataccgcttgctgaagaaagtgtaccactcatccaagacggtcttgtccttgtccggtaggtcgtaccactcaggtacacagtcttcgggcttgagagaagatagggcaagagcacgggaggcgtccttgccagcgaagactaagaaaaagaacagtcagtttgattgttctttatagtgatgggataggtgctgtactcaccgcgatatgaacccgaggcaccataagccgaatttcggcttacatcaaagacaacacccttaatggcgaccagagtcgggcggttagggtcggaacctagtgtaagatagatattagccaatgatccttgagctgggcgcattgaaaataaggaattgccgggtgttgtgatctgtgagggataatcttctcgtaccgtcgcatttggccagttcctcgacggaaattgggtcgtccttgggcgggtccagctggactgctactttgggtgcgaaacgcttagattctccttcttgttcggtcattgtgattgttggaggtgaggtcgagggggaaaaacaatattggggtttggcggggtttgccgaggtcggtacatagccgcttcggggctgcttactgtggactacctgattgatcggttaatctatttaagctattcttattttgttgaagcctatgttggatatagggttagaggattcgatttattttctatatacggagtactctggataggctatatcgttaatctttgacatttccgtatataatgtacctcggccttttggacaatatatcctctccaggtttgacccaatcgtagaatctgcaatgataagaacgtgatcaattgcttattcgggtagattgatacctgcacatgcatataaacagaaagcttctctctttttgccctaatctggttagcacttgtgaagagtgctgatatgggaattctctcatgacgtcaaggtatacacaacatcaactgttagactgcttccttgacataactatcacttgataacacggcagagtgctgtttactattcgagataatcgttccccgacatgcatccacgttcaaacatactaccgacgtcacatgaagacccggacaacaccggaacccatagactctgctgctcagctctatcttgacgatcatgttgacttccaagttgactcgtaaaatgcccctccatagagtagaggggccatgtggagatgaaacggagggggccgtgtctgctttggctgtgatttgtccctttccggttgttctttagtttgtccaacccaaaagcgaaaacaggaaaatcctacccacctgggcttcgaaagaaaaaaaactcttcctgtccgctttctcttatcttcatttattctattcgtgcacttatttatgttgcttccctctttcctggaaatacaaagaccttcgaaatgtcacattcccctacctcggggtatggctctcatactccaatgacggccgccatacagagcgcagagcccacccgcctctctgaccccgaatcgaaacatatcaagatagagaaagagatggaagtcaccgagaaggactcatctagcgccaatggcgcggcctcggtcggtagcggatccatgtatgaccatactcaccgcaagctcaaaccccgccatgtacaattgatcggaattggaggaacaattggcacggcactatacgttcagatcgggtctggactgcgaaccagtggccctggtagtttgttcattggattcagtctttggttagtctttcccttgttatactgtcttgttgactctattgggttctcgacctgggttgtcccggctttgctactttcgacaatatcaacatggacggtaagtaggtggaaatgcgaggaacgaaaaggaaatccgtcaatggatcgaaagagaaagagagaaagagaagcaaaaaagcgaagaataaggaacaatacaacgaaacgaagcatcaagaaacaggattcgaatccctgataacacaatttcaaattccaaggatgtaggacgccgttagcccagacacttccatgcaaaacagatgtatacatgtcgaaagcgccattagccctacctctgccaatgcatctgccgaaagccagtcggacacccaagaacccaacagtcctgcctccgtcctgcgtatatcttcttatactgttatctaggagttgtgtgattttgatcatcactgtctgtacgaacaccctttgcatctttcccaccagcagcattcttcccaccgtatcccatatggcccaatgccatatgacccaatgcgccaacggttcagcctcttgccccgatcgaattgctgcaacattcttgttctctcttctagatgtagtatgacatccaaactcacatcttcttttctaggcttggctgaaatggtcacgtacttgcctatctcttcgccgttcatccgattcgccggccgctacgttgatgaagctttaggtgttgccgctggatacaacttctttatcttcgaggccgctctggtccctttcgagattgtcgccgtcagcatgattatcaaatactggaccgatgcgattcccgtcgccgccatgaatgtggttgtcattgtgctttatgggttggtcatctttctgtgatccgcgcacgcgatgccagctaatagatgggaaacagggtattaaatctctttgctgtgaaatggtacggtgaagcagagttctggctctcactaggcaaggtcttgttgagcacaggcctgatcttatacacattcatcgtcatgttgggcggcaacccgctcggcgatcgattcggcttccgctactggaacgaaccaggtgccttcaacgggtactacaagacaggcgatactggcaagttcctcggtgtcctcgcagctgtcatcacagccagtttcaccatcgccggtccggactatgtctccatggccgccggtgagaccgttaatccccgcaaggtgctgcccaaggccttcaacggtgtcttctaccgtctcacggcattcttcgttctgggtgtcctctccgttggcattctggtgccgtacaacgataagaccatggccgatgctttcgacaacggcaagcccggtgctgccgcctcaccctatgtcatctccatggatcgcctgaagatccctatccttccagacatcgtcaatgccgtcattctcactgcttcgttcagtgcgggcaacagctacatgtactgtgccagtcgcagtctgtacgggctagcgattgagggcaaagccccacgcttccttaccaagtgcaccaacaacggcgttcccatctactgtgtcggtatagtgctcgtcatcggtctcttgagtttcctgcaggtatccaacagcgcagcagtcgtgctggactggtttgtcaatctggtatgatcccctacccagtcccattttcattcccatacacctaattaatcctaactccaggtcactgcctcccaactcatcaatttctccgtcgtcactttcacgttcatccgcttcaagaaagctctcgacgcccaagggatcccccgggaaaccttgccatatcgcagctggtttcagccgtatatcgcctatttcgcttgcgcttgcacaacggtcatggctttcgtcggtggctataccgtcttcctgcccggcaactggtccatcgcgacattcttcttctcttacaccatgatcggcgtcttcccggttatctacttcgggtggaaattctttcacaagaccaagttgctcaaacctgaggaggtggatctggtcactggtgtcgctgagatcgaggattataccagagacttcgtggtcataccgccgaagtaagtacactctttcttttagttatgatttggttctgacaatgcctgtaggaatatcgtatacaagtggttccaaattatctttgaatagaactttcatgggtctcgtcgctgctttggaagattgcgatttagaacatacccaggtgacgtccgctgcgaaccattggccgtctctacttcgaactatagacagcatgtttatatgatgttagcgtcattatgatacccgatattgttataggaaatgaaagaatagacgtgattattagtcgactcgcaatgcccttataatacatctaagtaatatcaacacacaccaaacagtaagaagatgcacatcctccatagccacacacaaagccaagctaagccaagccaagctttccgtgctatatgtctttccttatacacaatcaagcttcacccgatcctccctccgcctccttagccctcaaagcctccagccgcttctgattccgcttcccaagaacgcgcagagtattgctcttctcaatctccgtcatctgctgccaattcccaatctgcgacaacgtcccgtcgacattaacaaccatcggacccaaatgatctaatttcaccgctgtcccgcctccgctcatgtcgagtttgatactcccgtcgccttgttggttcgcgatggggtttaaggggtcgctagcggggaggtagaggtgcttttcaggttgggattcttgttcttgttcttggatctcttggttttgcgtctgttggttttgcgtctgttggttttgtgttgcagggtttgaggacgcagcggctgcagagttggagttggggttcgaggttgagtcacacattgtgcgggtttggtgcgtgcagtctgatgctttgaagctcgttgtgcactgtgggaagaggatgctgtacagccgggtgtttggtgattgcgtggttggcgcgttgagggatgtccaggtagtagagcccgctgagattgtggcgcgtacgaatgggttgacggatagatggaggagagcagcgcggtagactgtgcgcgatacttgcatggttcgggttttggaggtttgatgggctggtgggagggaaataaggattgcggagttggctccggtttctagattattcgagctcgtcgtggattgttacaccgcattcttcaacttgcgcttgtgttagatatgagtttgcatgattaattattacgcaaatagttctatcttgggtatgcatatatattatcttcaattttgtctgtgacatgagattacagagttgagaagaggtgggtgtcaatgggtgcttattttaccatatcgggagtctcaaaacttgcccagtccacctcaaatactccagatctatattctatggttaccaagcatcggagtcctgcgtggacttaccgcatgatacgggtgtaaatatgaaactatcgaaaccaccagttgacctgcaagtatatcagcaacatacacaaagtctactagaagaaacatactcaccgaagccgtaacaccttcaccaacacccttaatactatgccaccaccccttgggaatgaacaacccatcaccagccccaagagacgcttcaaagccaaccccagcatccgaaccagcggacaccggagtcccccaaaccatctcatctaacaacgctctttccctcccctgcatcatctcgtcgccgcggaaagccgctgcctcccgactcccactcttccccagctgcctcctcacagccccgaacacagcctgtccatccgctggcgcaagcagccgcacaaccttctccccagccagctggacaaacaagttcgggttcgggtcgcggtgaagcggcgtgtaagtaggcgggtgtccaatccacacattcgtatcgtatacatcgccctttcccgcacacgccacaagctccggcgtgggaaaatcttctctgaggataggagggaggtcaaggagctggcattgtgctaggtaaagccgcgttgattggggagttgtctcggccgtgcgcatccagtcgaggaacagcgtgagcggcgcgtggaattgccgaaagctatggatttctgccgtttcaccgttggatttggatatagcgtcagccggtgtggattccgtgagctcgagtgggacgaacgcgtcggcgccgtgttggcggagatattccacattcaggcttgcgccggggttcgaggtgtccggtgttgactccagactctcgcgtttgaaccactgtttcagggcggggaggtcttggaaggtagagcgcgggaggattgctggttgttcggggaggaagcatcgctgctggaaggtctccagggtggcatcttcgaggatgttgacaggtctgtattgagggtttgaagaagcggagaagtttcggacgcttgaccggggtttattatgaagggatgagcaactgagtcgcatccagactcggattgaccatgcctggagcttcatccagatcgacgtaggaagggcgagacaatgaagatcggacaacgacctcgggagatgaacgggtggatctccgagataacggtcttcttatcggtctaccacgtgactccatatgctgtttctggaccgccgacacaagtcacccaacacaagctgcagggaagcttgacttgcaggtgaaaaactgaaaactccatgtgtcaataagtataggctatatttagtcgtcaatacctaagataacttccgacgaatgcttacctcaagcgtgcatctatcggagggatctatccgtggactagaactatatatttcttcaccagcgacggtgactatactgttgtcgcattctccgctactaacaacacccctttcacccaaaaatggatcatttatagacagctctcggggcataatcattgtatcacagaccatgatgtagaggaaggacttggtcctccttcgctgcgggcaaattcgcttgtcacacaacttctccccctccctcaagatattcagagaaacgatagcctcttcccaggggattacgtggattatctgtgtgggctacaatgcccgggaagcgttctggccgctgcatcaaaacctacgggataaaatccgtgaagtacttctacagcttcgtgttctacacgcctaaattcatatagaacttggctatcacaggtctatggtcaccctttcgcataggaaagatcgtttacgatcttgattcgcaggctatgtatgtctatggcctggactaccgatttagggacagaagctgaccccatttcactcggcatatatgtggtttctggcagcgaatcaaacatggacggcactgtttacaacttgtttccgcagtacaaagctgggccgagaattgggctagctggagctggtaaatcaatatactatgatggtgcagttaatctattatcttgaccccgctccagactcctttctcagaccgaatttgcacaataggtccttggctggtatcgagtacgaaccctactacaaccaacacaagctgtaaaaaggcatcaagcgatttttcctgagtataatttgcccttcaacccattctaaaaaggatcaatcatgagccatacagggagtattgccgtcaatcacaaagaaggtgcatgaagccgacgaagaccgaggttaaaatggatccatgcagttttgtacatacccttgcacgtctgaaaaaaggccggccatgtgactgtacttccctagccaagaaagaccataacatttaaagctcactcttgccctcccaggtttacggtcgttgaattgcctacaattactattaacttgcaacatgccttcttccatcacccaaattcataagcgccatgcatacggcaaggatgctcacacttattatccggtcctcatagtaggtgctggagagtcgggagtggctatgggttgccggctcaaagaggtcctgggaacagaccagttccgaattttcgagcgtcagtcaggtattggaggtacctggtggatcaataggtatccgggaattgcttgcgacgtgtaggtgatagtgttctaatgtctaaaagctcaataactaacctagaaggtaaagaccagcgacattctactctttctcctttgctctgaaaaaggactggtccacacttcatcctcccggtccagaaatagcacagtatttggcagatgtctgcgagagatatcaaattgtggacaagattcagttgaataccgatgtcaaggaacttcgatggatcggggatgacgaggaatgggaggttacgctctcgcacctcgtccctggaaccggcgatttgactcaacacgaacgagatcgaatcgcggcccaggatggccatcagaagatctacgttaatacagaaattgtgcgagccaaggtggtcgtgagtggtgttggcgggctggtagaaccgaacacatggccgaaggacatcccaggtattgaacacttcgaaggtgacatcatgcatacggcccgctggaacaaccagatcgatttgaaagacaagaatgtcatcatgattggttccggctgcagcgccgcgcaggtagtgcccgagctggccaagccagaggccaatgttcgatccattacccaactcatgcgaacgcctccgtgggtcgagcctgatacaatttctcctgaatatctccctgtgtacgaaaaatggtcgcctagactggtgactaacttgcctggactggcgttattcatgcgatgtgttgttttcctcattatggaaaaaaacttccaggatatgttcacggacactgcatggagccgaagagcgcggccgcagttagagaagaagtttttggaccacatgcgtcaaattgcgccggagaaatactacgagattctgacaccaaactacagcctcggctgtaagagacgggtcatcggcggcacttggtatcgcagtctcaatgctccaaacgtggagctaactactcagcctttgacaagggttaatgcaaagagtgtgactcttggtacaggccgccactatccaccgcacaagtctgaagatgcagttgaggttagagagattcccgccgatgtgatcatcatggccaacgggtttgaaaccaaccaatggctgcacccactgaaggtgattggcagggagggcaaagatctggaagaggtttgggcggagcgtggaggtgcccaggcataccagggtatcgcaatggattctttcccaaacttctttattattttcggcccgaataccgcaacgggccataccagtgttatctttgcaacggagaatgcggtaaactactcgttgaactttatcaagccgatcttagatggtcaggtcagctcgtatgaagtcaaggaggatgccgagcgtgaatggactcagcaggtgcaggatgcgcttcagaagagtgtgttccgtcgtggggcttgctctagctggtacatcactgccgatggttggaactcaaccacatatccgtacgttccttgcttaatgcttcctagttgttactgacatagtatccagattcactcaggttcactattggttgcgttgcaaattccccgtgtggcggcattggaccgcgaaactcacgagaaagggacggattttgcgaggtgttcgaatgactctccatggtgccctcatctttgggcttattacaaccattggcttcttgagaaagaaccctcagcagaaggctcagttggagcagtcattgctggccggaaaggagtggctggcctcggcggtttcgcaattgaagcgatgatatcttttccttgtgtctttcgaaattggagcactatcttcagagccaaaaatatacgcaataacaatattatgatgtgcatcagtatacaaatctcttatattctccaaacgctaggaccaatgactgaccggataatcagatgagtaagctgaatctggggaaaccccgcgggagaggaatttctccgcactttaactcgatagctctcaccggctactcattgagtcgcttcatattctgcaggccatggcttcagagtcaccccagatagaaatgtcaccgccacagtcggatccccgcgatcattccgtcggtgcgtctgattccaacaagagaaaggcggaacaaggaaacggaacgcaggcgcgcacgaagcggaatcgctacatctccattgcatggtatgatatggcctgatataacctgatccggcacattttcctttccgtacctcggtcgctttaccttgcaccattggatagcctgttctgcattcaaagccatacgattctgcctacaccttcggtacttttgtcggcggatccgagctaatcgtggagttttcagtaatgaatgtaagcggcgcaaaatcaagtgcaatggccagatgccttgtcaacggtgtggccacctgaatttagaatgtaagtgggctcatagctcgtccgagctatccgatcaacggtctcatacgctgactcactcgccaggtcgctatgcgcctaattgttgtaataacaatttcaaagattcggagtaagtcgaggagtaaaacccgtccagcatttgatactaataaccgggctagtgaattccggtcaatcacagatcagatcactactctacaagaccaagtcaatagcttgttcagcaaccttaatgaacttcgtacccaaagaccagcctttgaatcaccagattttgagcatctctctcgaaatggatctcaatcagtctatactccaatacaagctgggctagaaaagtcccgagcccggcccccacgctttcatggtccaacaagctcggccttcaactttgacgtggccaaatccagtttgcagaatatgggtatcaccccagcggaagatgggatcccagatggcttgaccaccgcacatgtatctccaacagggtcaccacctcccaatctgggacaacttcttccaaccacacaccctaccaaggatccaatatggacaatcccgcgtgaagatgcaatgcgtctttgtaaggtttacgaggaagagattgggatcatgtatcctgtggtggatatcgccaaggttaccagccaggctaatctgctctacacattcatagaggctgccacccggacaggctttgcacaaagagggtttccgggttctgacggtcttcacgacgaaagctcgattattcttaaattgattctcgcaaccacgctggtcgtggaggggggcggtcagagtgaacttgggcaccgactctacttggatgttaagccatttatagaatcgaagttgtgggagcctcataccatcaaaactatccagctctttgctattgtggtaagccaaagttttttcaaagccgcagtcaataaccctaactttttttcccactctaggctacataccattaccatacggacgatgatgccatggcttatcggcttattgggttggcagcacggatgtgtttagagatgggattgcatcgtcggaatgctttggtgaagtcattcccagatgaggtgcagtgggacgagatcactcggctgttctggtcagtctacagcttggacagacgatggagtttaggaacggggttgcctttcgtgattcaggacgaggatattgatccgaacttaccagaacctgtaaggctgcaatctcttgccacgtatttacctttattaaccaagatgtgaaaattacaggatgcatcgttgccttacttgcgctgcatggtcctatacaaccggatcagctccaagatctggtactctggtttaggctccgaaggcaccaccgacatccgtcgtgatgagatcggctatctggattaccaaatcctgcagtggtacaagcaggttccagaagagctcaagttctatcctgtcgactcccccaaaaacggcgaaaacgtaagcagaggtatgaagagactcagggttctcttatacctgcggatgaaccagctgcgcatcctgatatatcgccctgtgctccattcttctgccagcattgccgaagatcgaggccacgcacagactgttgtggaagtagccaaagactccatccgtgtcttaactcggctgaaccagttgtccgatatctaccggacacagcaaataacattcaactatttcttggttgctgccttggcggttctgttcctagcagtgtcccacgccccggtcgacttcaaccgacaggtccgcgatgaattctatatggctctagacctggtcaacgggtttagtaccaagtcctacgtctccaagcggttatggaagacaattaaaggtctacgaaagatcggcgagaaacttggtgttctcgcccgtccttttggaacggactcaaatgatcctcattcaagcgctgcggtcgccatggccgggctcgcgggacatccaatccaggacctgtctatgtacgggcctctgaatggtgggaatgaacttggaagtagtcctctcaatggactccagatgagtcaagagttgacaaacctatttgaggctgttggcgcatttggtaatttcatatctaacacttcaagtgacggtattaatggattcgttgggccggatggggaaattcagaacactggcgagggtttatctggggttttgggtgatgagggagagtttgcccgagtcattcgagacttattttgatattccagtatatacccttttatatttacctaggtagtaacatagtatcacaggccagttggaaggttagctaattgagtcgatatgaatatcttgcgtacatgtctgcagacattgatggcctgcttctcttcccacgtcagctgacacgtgactcctgccactcaggcaaatcgaaacctgccagcattgacttcgctttagccatcgtgggagacaacagatacacaatagctgtcccaaaacgtgaacgcccaagcctttctctccaactacccaccgcccccacgaaccgaacggacctaacccgattcgatcgacacacccaacctccaggctcgatcaccaatattaacctccgagcgtctttgagctctggtaagtgatccgacggctttcgatatgaaggccacaagaaactgataagattctagtggggccttagatccaacctcttcccgtcgatcgcacaatctcccctctcccgcacattgccatgaacatctagcttttggcccctccatcaacttcaagatctcctccaattacacttgaagtctttcattctgacccccaaaccctgtaccccttttcgccacgagccagcctctccgtgtgacgaaatcgcttcgtcttcgccaacatcgccgaagacctcaccccccagctcggcaacgtgtcgagagagacaggttcggcgttggccgacggcctcgacaggctggatttgagtcaactgtctgaatcgaccctttcgtcatctgtgtccgcctcattcgacatgtcgtcctcggaaggcgcgccggagtcctggatttcctcgttttgttcgttgatgggccatgagtttttcgcagaggtgtcggaggacttcatcgaggatgatttcaatctgactggtctccagtcgcaggtgccgatgtacaaggaggcactagagatgattctcgatgtggagccggaggatgacgaggaagaggaggaggaagaggaggaggaagatgaagacgatgcgctcggcggcgaacctgcatacagaagagccggcgatcggcgacacgcccgagtcgcaagcgatttgagcgtgatcgagagctctgctgagctcctgtatgggttgattcaccaacggtatatcacctcgcggcctggcattcaacaaatgctcgaaaaatacgagatgcagcattttggcacctgtccgcgagtcaactgcaacggatgcaaagttctccccgtaggccgatccgacacccctggccacgaaacggtcaagctcttctgtcccggttgcatggatatttatacaccccccaacagccgtttccactccgtcgacggcgcattcttcggtacaacgttcggatgtctctttttcatgacattcccagatctggatatcgggccccgtctggatgcagcactgtcatccatctcgccacggaatgcagcaacgcagtctcgcactggctctctgacacgcactccggcaggtcgccaggcacggtcgcccacaccagagaatcagccgctagaaatcaacggcgtccggacacccaacctctgcccgggactcggcaagggcaagatctatgaccccaagatctacggcttcaaggtctctgaggtctcgcgtgtcggcccgcgcatgaaatggctgcgcatgaagcccaaaaatgttgtcgagctcgacgaagcgtggaatcacgagcatgggatgtctccgcaggaggcacgcgacgataaggagggcgacaccgagatgaaccctgaacaatcgcaagatgctgccattgcgaaccgcaagaaggccccgatgcgacgccggcgaccgaaccttggcgccctagtccccacagatcctatggacgtgcacggtcgatgaggggataaaaagcttgcattcgtggttgtttcaagattaagtcaccgtgtcaggggaatatctgtgccatgcccttgacgggacgattggttcagagttgatgacgatgatgacagatgtttgagcttggtctactcgctgctttgaatgggattctcttttcttctaatctattgggcttttattctgtctgcgcgcatcttcctggccactttccgcgatcctgtttcgagtacaaggatcaacttgtccccattcattgttttattcttttgttcgtccgtagactcagcacattacttttttgaatggaacatgatagtagtaaacattgcttgccaactatctttttacctacatgcttcacacttttatgactcgatgggtacagagtcaccagggcccacctccacgtcagaagacaaatcatcataagagcaacagagcctcaagtaccacaataccctaaggatctgcaaggaaaagctgagcctccaccaactttgaggctccaactgcatgtgaacgtcgcccaacaggctcgtgtacaccggcgtccccgacgtaacccaacgcatggggaatttcaaactcaaacattccaaatcatgcagcaagtccctaagtctactcagtcatacgctagcgtttgacgttagcacatcggcgacgccgacgtcaaggatgcacgatgcccgtgccacctatgacaacagtctcgtattgattaggccgtgccttagttaacttacttcacactctgaatctgatttgtaaggatacaaagtacataatttataatccactcaaccggtaactacctagacccctgcacaaagaaaacacaccaagtctatatagtgcgccggactggcggactggcggaacggcggatgagcggtccacctggaaatcccattggggatttagcgtatatgtatatatgcatggccacacgcaaccctagtcaattattggggttgggcgcgtagacaacttcttcgacttggtttgtcctattggagtcgtgagattgtggtgtaacgctgggactgggactgtcacatggggtatacctcataaccatggctaagattctttgttggtgacgcgttgcgattctcaggtattggacgatgctgttgacggtgctgttatggtgggtcttggctggtgagtgcattgtttgtgctggcttattggttttggtatgttggttctggttgccttgaatgagggggttttgtattgccacgctcctctcttattctatttcttttttaataatagctagggatattggaccacatcaatatctcagtggtctaaagttggtaacgttgctatattggttttccaacaatgtagtatatctttcttcggctaatacttttgacgatttggtcctttcaaatttacttttgtaagaacatgagttaatatacagatctatgaatgaatggtgagatctttaattaaataaccttgcataatcttatatcttggcactggacacagtcagcctggaaatgagttgatcatcttaaaattaggtcttacccatagtcctggtgtggatcaaggcccattgaagcgagtacaatggtcccccctactcaattgggtatcatgacagcactatcccaacaacataaagcctcgtattactcggacttcggagaaggaaatagagaggaaggggacatctacggctctctcaaccaagccctattgacagaaaaggggttttagctcctaaattacatttcaatgttcgaagtaatatcattgcccgttttaggaaagactgtgtgcggtggctgtagcctcaacccactctataaacccactcgggggacattggagccacaatttagaatcaagtaagaaactggagaaagtaagagccaaaccttagttagaagccttcgattactctattgggagcttatcaaggcttgtttttgcccacctaccacgtcagcaacattaacgagcgcacgttctctctttgcccttcgggaagaacccgagactaaatgctgactgctccaataaatagtctatctcagagacccataattggaggctcatatggcacatggtcgagaatctagtactccgtactgcattcctaattagtgccacgcacagcaacacccgcgtggaaattacaaatcacaacatactctagaccagcagctcaaaacccaaagtcgatccaagaagatctcgaccagctcgaccagctcgaccgagtattgcccatgcatgtcgacccaaaaatagtcgtactccgtaccaagacgccaagcactccatgtatatatgcgtcgcaaatcgccttcctcatctgtcaaggctcaaataacgaagaactcccgacatagcaaccgaaagacctacagaccacggttcccaatactgcggtctcccgcgctgactgcggccagccccgctgcagaatgtggagtttgacggcgcatatcccttaaggcgccctacgggtctgggcagcgataggccgatcttagctggttctgattcttgacattaggatcatcatcatgtcaacggcatttgtccacgggtgttcagcttgctagctcacatatgtagtgggtaattcgaggaactttattccgctgtactttttttttttccgttgcatattcccgttgatttgcgctgttttgtctagcctcggactggggttgccttgtaatggtatgtttgatgcgagggatagatatcctccgccctgtacggagtatacggagtatacggagtaagtcttactagcacggaagctcgaaccacagctgggggatcctatctctttctctctttattcggattcccagcctcggcaataccggccgagttgacatttttggctttcgccgtagataaggttggggacaaatgcgggtgaatcactgcaacatgcgacgtgcgacgtgcagagaggaggatcggtcaaaaatccgctattatacaaacataaaacaccttcctctttggccaatgctgaagccctctggtccgcatctccatttttttttggatcgacaccggtcagggatgggggataggcgggaacgctgcagcccagagccgccaaccctgataagaggaagcccccaggctaagccaaggctaagctgggataggaaaatgaacgctattggttaggccgcatactttcatgcatttagccctttagcacctcgcctctaaactcccgccatgtgggttgagcgggaaggaaaaccacctaaattatagcgttcagcccccaactctccagtaaacgagtacggaagcacagagtaccctaggagactaattcaggccgacagatggaggggccgtgtttttttcgcatcgtcgtatgatcgcagcttttctttgcggcagtgattgcatacagcaacccccgtgccattggtcttggatagcaatcgttggagtcagaaggcttcctcggaaacagacctttgggacccggatgcggatgtacactgtacccggggcgaaacatcaccaatccaaagtggatgtgacggttggaaattaaaacgacagcgtatattgtactagtagtaggcgtgttttacttggctccagtttttcggttggctttcttagggtgtttcttagcttcgaggatcgaagggggtccttggttaacgtgctgtcctaaccaaagtactccgtccgtacaaatgcttgaaaggaggggggggggaagagttgaggcggagcaaagtctcggaccacgtccgtggaccgtaggcatatagggaaacaggggtggatttatggggcggaggataatgcagattgcatcatccgacggatttattggaattccagtccgtttgaaatgtcggagtggctgttttagtccaactggcccaatatcccgggataaagaagtgctactccgtatgtggggtattgtctctttctgcagcgatcgggcttttcccagcagcctggtccttagttgacggttggactttgctgactccgtagttcgagatgtttcttgagtcatgtacttgtgaacttgtccgctttaagatatcggtcggtggtttgtcatctataactgtccacgggtcactagttagggttaccaaactggggacgtcattgacgaatagacggtccctcaatcaccctcgagaccttcagaacagaaaagggatagtctcggccgtacagaatgtctctcgctaggctgaaattgaaaatcccgcacggaggtttgggggccgtggagttaatgcaagttatgctggctttggaccaatcgctgggagaacttccaaggttatatgattctattgtgcagtgatcaaattcgtctgtactctgtagatctggattaatcagaaagcaggaaaacaaagcatcgaaagaaaaagaaagaaaagaatccattcaacgtggctccctggctcacccctgttcccttgacaccacgctaccaatagaaagaaaagaaatcaacgccagttatcatgcagctatctcatcacacatacaacgtaataggggtaaaaagggctaaaacaaaacagaaaacaaaaataaaaataaaataaaagagtggggaggcaaaaacgtgtcgggtggattcgagtccggtgttcggggtcaatagggcctggatggggcggagatacccgcacttcgggctttgctgcccccgatcgccccgatcgccttacggccgtagatcgtactcatacaggccatgcatggagcgcggcgagcaggggcctgattccggtgtgagcgggaatgtgaaaatagatgtctccggtgacgtcgacggtgctcgttggtcgtagtatgcaagcgctggcatctggaaacgcaagcaagatattagctgacgggtcggcaattcggagtagattcagcgaagaaattgtaccgggagcgccgaagactggtgttgagaatgggcctgcgcttgggcttgctgttggcacaggtcgatcccggccatggttgcgtagctcatgctgaacggactgatcaggtcgtcgtcgtaggccagtttgcgggcttgcatcgagggcagcatcggcaccagcgaggggagctgctcgccatattcggcctggtaggcgatttcgctgtaggtgctcggcgccgcgtggtagatcggaggctgggcgtaggacggccggtaggtgtcatacgatgccatagatgggtaggagaagaccggtgggggtgaggccgaaagctggcgagtgcactgctgggcgaacatggtttggcggtcctcgggggaatagtagtcgtacgaggcagctcggtctgattgcgagtggggcttgacatctgtgactttggagcgcggctttgttcgagtctttggcgacggaggagagaccggctctgcgtgggattgctcgggcgaagcagaagttgcagctcgtctctcgagatcctccaagcggcgcttcagtttcttgcctgttgggttgcgccgggtcaggaatgtacactcggaacggtctttctctttttcacttacgatagttgcgttgcgcaatacggttttggatgcgccgacgctctgcgagatccgagatcttggtccagtcctcgtttgggttggcgttaggactgaatgcgctgctgttgaggtgactaccacgagagcctgaacggccatcgtacgatggagagcgattcatagtcaagaggcgaaggccaagagcgatcaaggtagagtacagaatagagtagacagagagggaatagtatagtagaagtagaagcagaagtggaagtgaaagatgaaagtggagggatgtgataacggggctatgaggctaaagatccgtggccaagtggatgtcagtatatttatatataagacgtcgaggactcaaggccattgatcagctggaattggtttttcgggccttgcagctaagccccgtcgcgataaccaggtcagtccgtgctcgaatgccattagactcgacttgccatgtgcacaaaagtcccgggcttatttcgtttttttattttattttttattttgcccagggatccacgttcagcctctggtaatactgatggatactgtcatgaaacgtctaactagatatgtacaatggtcagtctactggaacggatccgcgaaacccttaatatctaatataccaatcactagccaagctgggaccactaaactcctaactcctactactaacaccgacaggccggtctctgatcggtggatctcagatctaatacgtagcaccaaagtggtacggcgtatgatcccaatccaagacggtaggatggattattggagttgggccgggactcgctaggcgttcgctcgagggcgatccttatttgacctgactggcccgagacacgatatgcccagggatgaaacgggatgcgtggactttggggttacaccttttgcctttactttcttctcctatattctcacgtgggttgcttcaatgtgcacggtcgtgaccacgtttttgtttggtcttcatcttggcaacggactaggggataaagatctgacttggttgatcaggatcaggattctggcactattggaataggagaagggattttcgggactatagacgaaaacaactcctgggaagtctaggcgccctggagtcgggaagtcgggcctgtatcgcctacggatgctgaacaattgggtcgtatacttggattcaccctgacgcatgcactggacgagccaccgtccttcgtgactctagaattaatgacactttgcttttcttggctctttttcctgctttattcgtttttttcttttcgatttttcttttctttttttctgaattattcacgcatttccactggttgcctgattggcatcgacaatcccaatcaaggcatacgctgcgcagaaataagggctggccgtattcctttttcgtacattgtagttgggagttaatgtttgcttactgtctagtctaatctacagccccggagatacgcctagacccagattcttgacaaatacgaaatacatcgttcaaagcccggaaatcgggggccggaagggaaatccgaaaaaagaggctcttctcaggtaagacagctatgctatgaataggtagccttgcagggtctctccgccaactcgggtcggagttaatagcaggaatgcagtgcgtattggtccaactccgctagtgcgtgcccgaaagtcgtcttatcctccctgtatagggctgagttggacaccttcttattcctgattgagtaatgtcggagacgcatcccatgaccccagtgacacgctcaacgagcacggcagctcaggtacccggtacatagttctcttgaccgctaatgctgttcacgcctccagttggaattccaagcattgcacagccatcctggcggaaacgcttcctcctgcagggattgtagccactcacataccatgttcgtccccggatgctgggatcggttgcatttcgagccttctagtaacaatctagaagaatgttcctggcggtgggctatcatgcagcccccgaccttgctgtgtccgagatgcaccccccatgacacatgcgtcgctgcagaatgcctcgtcttttcccccgttgtgctttacttgtttttgcaatatttcctttttttgaggagcttggtgtcactcgaggattatcaatgacggcaagctccgagcctcttgcgtcgtgctggcacgttgtcgttctcgcttggggttgttacactaaacgtgaaatggaccgatgtgcgaaagtccattcaagcgagttcactgggtgtgccaacttcattccagttcgcttcaaatagatttgcccaggtcggagacgtcggacaaggcgtccagtgctgaagctggcgaacaacacaatctccgatgcgagttcatggcaactgcaaaacgaacatggtcaacatccagtttgttgctctcttccaaggttatctcaagtcacaccaacaactcggcacttaacttcttcaagtttgcgttttactatatttgtcatgtataggtcaacaataagtccgggagagaataattatagactctcgtcgggggtatcccaagataagaagctgaccacctgttcccctccaagccacccaattccagttattccccgatgcaatagaatccataagagccttaatcgcaaccccccgaatatgccgaacactaaatttagcctatgagatccaacaacccccattgttctccatgcggaacatcctgaaacgtctgtcgtaccccgctgtggttctaacttttgaatctgtagccgaaaggcgtacagcctgggcctgaaaccctctcaagtgcagagaaagccgagccggttgttctttttttgccgttcctctcgcttcatttgtcgcctctgggtttagcctcattccacgtgggccacgttgctgcatgtcgcctattttaccttgttttcggtcaacgtgcagctggatatctgccgttggtctaggctgtattcctgcgatatgatccattcatccgggctatcaattggatggctccataacccttgtgattagattggcatccacggccctgtctcagggtttgtctgaagtcaatgtggaattataagacgaaacaggcggggttacgggttcgggtggctgacagtcgtcagcactatgtttgtgcaaggtcaagctaaacgatctacatatctgaaactccatgtgcttgggatagtattatgctcgtaggtatctcagcattttctctgcaagcgagttaattcgactcgggtttgagttattggctttgaaacgatctcaggcaggtatttctctacataaccgtgtagaaggcgacagcaaaaagtaccatttctacttcaactgcatctgcatctgtcaacaaagtctgcgttggctcttcttcctgacatatttcacgaccaattattttctttctccatcttggtaaatctgtcatggttcgtggcgttatgtgaacaagttccgctatataattttcattgcccgggtgaagatatatattttggcatcgccagcttgtaaactcattgaacattatgcaatcctagcatactctataatgcctatactgtgattatatgtatcaaattctttaccttccccttcctagaggtcctcatgataacatataacagcactccatcaatgcctcgaatggagttgttcttactgttgtgtaaatatgtgttttcccgtatcttctcgtttcaagacgtcgtttgcaccttcctgcattatcccatgagcatctacccgtggacataattggaaaggtaaagaatcacctattgacgcctgaatccgtatagtctggatcataatctctgcaccttataaacgcctcttcttctgttccctctcctcctcctcttttccatcttaatggttcttatttatacacttctatatcctgccctttctccacctatcacattcctggcaaggcatttgcaatgagatcttatcaccttgaatcctcccgcatgctctttggccgtatgttgatcaaaatatcgataagtgcagcttggttcttcttccaaggggtatggatcaaggacccgtatcccttattagaggagaagggatgcacttagcgatattctgataaacataatgccaaaaaacatacagaacagattcatggaaataagtctttgggagtataggaggccactataaaccaccagatggttctggttcatcgttgccgattgttactccaatctttattctcaatcaacgtccaaggagtatctcaatggagttgaactgacttggtaagaccttcgtagtttgtattttctccccccagaaacggtaatatgccaatcatacagcacgtgttactcgaagtgtacactatacatctacgaagttgtaacttaacgaaaaaccgaggataccaaagttcggaaaagctctctttataaagaaccaagctccagatgaatatgtaaaagacgcccgccgctgctcggtagcctcggtacctcaaatatccaaacaacatgcaaaatgcaaaatgcaaaattaaccaagtatcccttgagcaacgacttttgaaagcctctgcagccatactacaaagcttaggcacagaagccctttcatctcacatgtcagtcttagagcgcgacactgacagattgttagtatatcatccaagttcaacaaggtcagtgccaacttacctccattcgtgcttctcgtcaccgtattggataccctccatccagttcttcatctggagagcaatctcacccgcctcctcatccgccttcaaaccacagtcaaccgtcttacctctgtagctgatgttacgaacagggctgacgatggcagcagtaccggaaccgaatacctcgatcatgcggccctcctcggctgcctcggcaacctcggacatgcgaatcttgcgctcgcaaatcttccagcccttggggccgagtctctcacgggcgagagtcagaacggagtcacgagtgacaccctccaagatcgtaccgtcaagaggagcagtgataagctccttctctccggtctccttgttcttcaaagcaatgaaaaggttcatggtgccgacctcggtaacatattcctcctcgccgaagagccacaggttctgctggaaaccacgggatgcggcctcgagttgaggcagaatgcagggagcgtagttggctccaagcttcttgtcaccaacaccgccgggccaggcgcggacggcgtaatcagtggcctccagggagatggccttgaacccagttgggtagtagggacccacggggctggcaatcacgtacagaagagcggatcctggtgggccaactcccagggtcttctgggtaccaatcatggtagggcgcaggtacaaggagtagccgcgagcgctgtggaggttagcaaggatgtccatctaatctacacaagatacactcactcaggaatgaaccgactatcgagcttcaccaattctccaataatcttcgtcagggcgtcaccatcaatagtaggaagggcaatgcgcgccgaagacttgttcaggcgttccatgttcttattggggcggaacagacggatgccaccggtgctgtccttgtacgccttcataccctcgaagcattcaaatgcgtagtggaacacacaggtcgcagggtccaagctgaggttctggtaggggataatgcgaggtgcgtgccatccgtctgtagctgtccactccacggagagcatgtgatctacattacatccggtcagggtctggaaggcaatagagcgcagagtttctcttacctgtgaagtactttccgaaaacaagatccttggattcctttagctccttaggggtggtggtcttggtgatagtcaatttggaagggtcaagacccgggagctgggaggcggctgccatagaggcgctgaaagttctctgccatgtccggctggcggtaatgttctgtgatgagaggacacggggcattgagagcccggtcagagcctgtcggcgagcgaattggtgaagcgacttcatgactgtggtgatgttaggaacgatccaagggccagccaagggtatagagagtgaagagtgtggcaattgagtcactgggagaagtataaacgtactgaaatcgaggaggtcaatggaggtttatatcacaaccagaaagatgactccgcgccagaactgcagcctctctgcggagctcgacaacaactccgatgactcggaggccccaatcaggaagttctgccaccgccctacagataaagattgtcgctgccaatcagcgactgcaaattagagttgcccgccgacttcggctagttcggcttcctttggcttgctgcggcttgcatcggttacgaccgagctcggtagggcttcaggcctgaggcacatgccaatagtttatttatgcctaaggcaacataccagctattgacacgatcacgtgataatatcgattggaagagtgcctgttatcgaggacctgaggtcgtattgcgccggattattgaccaagtatgcaaccagtggacaatttctctcagcctttgagctaatgttcttaacctcccattagccatcgagtttcaacaccggtccaccttccatagaccctctttctaaatcccaccgttgttgaaactaaatatgtcttatgctggctacaccgtgacgacactgtgaaacgaacaactcccttcattccgactatcgtgccgaccaattctcgtctgcggccttaccaccatgttttcgtctgcgctcaaatcgttcagttccaacatttccgcccattaccagatctcacctaaccctaccgtctactccggcccctggaaaatccacgatgcaaagaagaagtccacaggaacggcggcatcggtgtttatatttgatcgcaagtcactggagacacgctctaatgggttcggaaggagttctgggtcctccgccaagaagctacaggacgatgtgatcgaacgactcaagcgcgaagcaagcaatctcgcgcgcctacggcacccatctattcttcaggtactcgagcctgtggaggagacacgtaatgggggtctcatgtttgccacagaacatctcaccgcttcactttccgggctgctgctggaaaaagatgaccaagagaataccacacgcgccggttcgcggaccagccgggacctggtgtaggagnnnnnnnnnnnnnnnnnnnnnnnnnnnnnnnnnnnnnnnnnnnnnnnnnnnnnnnnnnnnnnnnnnnnnnnnnnnnnnnnnnnnnnnnnnnnnnnnnnnnnnnnnnnnnnnnnnnnnnnnnnnnnnnnnnnnnnnnnnnnnnnnnnnnnnnnnnnnnnnnnnnnnnnnnnnnnnnnnnnnnnnnnnnnnnnnnnnnnnnnnnnnnnnnnnnnnnnnnnnnnnnnnnnnnagcccccgccggccggctgggggacccggccggtacgtggttgaggaggctgacgggactcggagaagaagagaggtggagatggatgagttggaaattcaaaagggactcttgcaagttgctaaaggtcttgaattccttcacgagtctgcgggcttagtgcatggaaatctgaacccggaggccatctatatcaattccaaatcagattggaagatctctggtctgggatttgcggggcctccagactcttctgaaactcgttcgacgctaccgccattggctgtgtccgaggttctctatcaagaaccaaggctgcccgcttcggtacaattgaaccttgattacacgtcgcctgactttgccatggactccaatgtgtctgcggccgccgatctattctctttagggctcatcatcatcgctctgtacaactctccgcatgtctcgcctttacaaacgcacgcaaatttgtccacatataagaaactgctgagctctccgtcttccactccgtcacagagcaataatttcctcagttcgaagccgattcccaagggtctactttctgatgtcctaccgaggctcattacccgaaggcctgcccagcgcatgaatgctcgagaattccagcaagcacagtacttcgacaatgtgttagtttccactatccggtttctggaatctttgccaacaaaaaatcccaatgagaagactcaattcttgcgtggcttacaacgggtactacctgagttcccggtttctgtcctagagagaaagctattgggagccttgatggacgaactcaaggatcgggaattgcttccgctcatattgcaaaacgtgttcggtattcttaagcggattcccaacggacgccgtgtattcccagagaaaatcatgcctcgtctaaaggaagtctttggagctggctcgggcaagggggctgctgaacgagactccaagaaagatgctggtctcatggttgtgcttgataatatgaagctgattgctgataattgttcagggatggagttcaaagatggtgagttttgtaaatggaaacctttgagcttaaatctcacgcttctttctagatattctacccttgattcggctcggactggattctcccactcattctttggtggatgcttccctcaaatgcctccctgtgatgctcccagttcttgatttcagcactgtcaagaatgaggtattccctcccattgctgccacttttagtcgcactagcagcctcgctatcaaggttcgcagtttggaagctttcagtgtactttgcggcgcctctgcagaaggttcagacgggtttgacgatgatttgtctggaatccaggcgactaagtcaaaaccagccaagtcctcgatattggacaagtatactattcaagaaaagctcgtcccgtctctcaaagggattaaaacgaaagagccgtcggtgatgatggcagcgttgaaggtgtttcgtcaagttggaactatcgcagataccgaattcctggctttggaagttctgccggttctctggagtttcagtctcgggccacttttgagccttcaacagttcaatacctttatggctctgataaaaaccctctcagcgaagattgaacaggagcaaagcaaaaagctgcaagagctatcctctggcgctggaccaacgggtttccaaactggtgccgacgaattttcgcagtctgccactggcctgggctcgcccgatgcggacggcggcgctggcagcttcgagcgccttgttcttgggaagaaggcattgcctgcaaatggccagagtatagatatgtggggtagtatggagccagccaagccagcggttccaagcatgctgccttcattctcgtggtcttcaaataatgtaggcatgacaccccaagccaatgccttaagccaacagtccaatcttggattccgttccattactccagatcagaaattgggttctttcccggctcttgctccttctcggcaagcttcaccggttgtccaagccttccctactatgcagccctcatcttctacctggggagccccagccaatgccaatgttcggtcccatacaggcccaacaggtcagtctttggggtccatgtcgactatgataccctcgaatcatatgtccgggtcaacggcgcaaccggcacccaactactcctcgttctcaatcccccctcctcctacaggaaacatggtgtccaacaacgctacgagaccccctccgatgaacacagccaacagatcaacgtctttccaaggcaccgccgcgacaccacaggcaacgcaaaagcaagggttggacaagtatgagagtctgatataaggaacaattcttgttattttctggctgatacaccttttgattgctgttattgctgcttttgcacattcccggcatagtaaatagtcgcagcagcagttgtaattaagaaaagtgacaaaagaacattcaattagcaaatcagcccatgccaagcaatgtagatcgggactccatcggtgatccggccgttggctagggagacacgtacctgattggtgcctcttcatactctatgtcatacttcgtcgttaaacccctccatatgcactcaatgcgtggcattgcgccgcatttgtcctcccggagctccgtgtcacctttgttacccctccatcgaatctcacgccggttgactcccagactggcaaagaccttctcctcgtatactcatctaactcgcgccgccatggacctgagcatcaaacagcactatctggctgactcacctccgaccgtggtcagactggaagtcaagtcacactttgatacactcaaagaccaaaacttgagaaaatatgcgcactttatgagcaggtatcgtgttcctggattccacctcaagagctattgacagctaacctttctcgttatacagggccgcgtttgagggcactcgagtcaccctgcgccaggtctcccccgagtccgaacctatatacgacctcatcctgtcactctaccacgccgccaatggcgactggaacagcctcgcccagaaaacacaagtcagtcccgacgacctccgtttcttcctcgaatatgcgagtcaattcttgggcaactgcggaaactataagggctttggtgactcaaagttcatccctcggctgtccgtctccgcattcgaggctctggcatcggcgaccgcggagacaaaggcagctttccagaaggcgaacaccaccggaggagggatctacgagaccagcgaaggatcgatgatgcacctcggatatcccaagggcggccacatgaccacctactaccccgattcgccaacaatctcaaaggaggaaatcacggcagttggtgacttgatggagaagaagggacttgcgttggagaatactagactccggaagacatcctcgggtgatttcgagcttttgatcgcgtctggtgtttcgtcgcctcctgtgagggaccgggatctcggcgatgtggacacatttgagcttgacggagatctgaagggaaagaaactgcgtcttgtcttcggtgaccatcaggaggagatggcaaagatcgcgcacagcatcaagcaggcagaactttctgctgcaaatgataatcagaagaagatgttggactcatatgctctctcgttcggagctggatccatcgaggctttcaaggagagccagcgcatctgggttaaggaccaaaagcctgttctggagacgaacctgggctttgttgaaacatacagagacccccacggtgtgcgcggagaatgggagggcttcgttgctttggtatgacatgtgctagatcttcattggccggtatcgctaacattcgcaggtcaatctggagcgcacccgcgcctttggtacgctggttgatagtgccgagagcatgattcccaagctgccctggggtaaggactttgagaaagacaagttcctcagccccgacttcacatcattggaagtgttgagtttcgccggctcgggtctcccagctggcatcaacctgcccaactatgatgacattcgccagaaccttggcttcaagaacgtgtctctgggcaatgttctcagcgccaaggctcctaacgaggctattcctttcattgccgagaatgaccaggaggtctaccgctcattccgggacccggcttttgaggttcaagtcggtatccatgaattgctgggtcatggaactggcaagctgttgcaggagacagcgccaggggagtacaactttgatattaagaacccacccatcagccccgtcaccaacaagcccatttcgacctggtacaagcctggacagacatggagctcagtctttggttccattgcttcgtcatacgaggagtgccgtgccgagtgcgtggccatggttcttggctgcgactttggcatcctgaagatcttcggattcggcgatggcaaggaagacttggctggtgaggccggcgacgtcctgttcgcggcctacctttccatggctcgcgccggtctggtcgccctggaattctgggatccgaagacccagaaatggggccaagcacacatgcaggctcggtacagtattctgcgcaccttcctcgatgctggtgatgactttgttaagttgtcttacaagaaggaggatctctctgatctagagatccatcttgatcggtctaagatcctgactcatggacgtcctgccgtagagaagtacctccagaagctgcatgtctacaaaagtaccgcagatattgaggctggtaagggcttgtacgacgatattacctccgttgacagctggtggggaacctccgttcgtgaggtcgttttgaaaaagaaggttccacgcaagatctttgtgcaggccaatactattctggagggtgaccaggtcaccttgaaggagtatgaaccgaccctcgagggtctgattcagagctatgcagagcgtaacgtctgatatatttatatacagtatacaaatgaaatgcatatatattatatatctctttcccatggaagtagctacatatacatatcaatagcctcctttgtgatgtcttcccagatccgtttggacgacctttgtgtgactacccctattccacaccaaactactccaacagctcaggatttctagactaggtcgtatttgattctttccgctcccttgctattcatcgtaaaatccaagtcaagactatgcggcggatggacattccaagattgtacacaaaccctggactataaaatgatagatcaatagtacaacatagtcaggtggggaccggctgggaataggtcaacacatctgactgacttcgagtcacgcccatttcatctcgcaataatgttcctgtaaaatagaaactcgaaattgaatccaaactaaaacgaaactaaagtacaagacagaggacaccatatgtgccaagtttcgatggtgaggcgctcggacttaccgccgtccaagttgatctacccgtcttccccaacctctaagcgctctccttctccaacactcaatcactgcgaatctagcagatgaaagcttatatctgttcaactccctttggaaacaatcctttcttcaaccaggtgctggaagtcagtcattgaattggaaagactcgccgacacagcaacttggacgacactcgacccagatcagtcgcattgctagactaggtcagaattcgatcatctcgattgcgcatatcagcctgtctgactgattcaggcaataatagaaaccacggtgtcgcgagaaacgccgccgtcggacccatcaaccacggcgtgcccgccccatccaacggactccctagaggaggacgacgattattacactgcacctccaccgcactccccagcatcagtgtcaagttcctccaccgcatatcctccgccattttcgtctcttaccttttcgttaccgcaagacacaaatcgcccttacaaagttactgagcctggacccgcttgtcctccagccttagcgcctccagcacctgtcgaggagtcgctcgagccggccccatcttcggcagttgttgctgatacaaaagcgtctttcaccgaaccaaaaaacgagggctcttccgacgacggtgaaccaccaccaccatatacagaaggctatagtccacttgagtcattcacctacgtgatggctgctgcaggaggtgcctccagtataataacccaggtccagcagaccgggggtccgccaatcaacactcttggtggtatgtttgtaccactgccgcttggtatgctttgcgctaacagggtataatagatatcggcggagatgaacatgttggtctcgaccttcggtaggtcacaaattgatatatctcaattatgcatagtctaacaagttgatagtggtacgcgctttaccctttcgcgggatgagctgttgactttgcctgaatttgttctgctctccctcttccccaatggcctcctcccggatggacatgctgcaaatggtttccacgatggggatgtattcccggttgacgtacgcgaatccctatcttgagtattgaattctttctgacatttattatccagtatgacccagtctcacttcagtacatgctggatttcttccggactgtcgcccaaaccatccccgcatctctgccttccagctcaaactcgccagaaatggaaatgcaggacccattgcagggctcagcccgtgacatgctgcaagaccgtgctggcattattgttctccgtgaggaccttgacttttatgtgatccctccctacgccgatattggacacgatgaaatgcttgaagtcaagcgggcggccggcagatcactgttgaaacaggacggcatcttttctggactgcgcaagagcgaggagattggatcaaccgagcagcatcttattgaaatgctgacagctgggtgagtagaaccgggttctcaattatggggccaacgctaatatacaatatagaggatttgatcgttctgaccagtggggccaccgtgctccagagcccaacaaggcagtaatctgcagtcttgcgctggccaaactccgcactgacatccgcggagacctgtcaaacaacaattctgtgggcatggcccagaagcttctcctcttttggcgcaagcctgcccgccgctgctggtgggagggtatcgagctggacgacgtcgagggcgtcgagggacaagtaaaggtctggatccggcgtgtgtggactttggagatggtaagccccctattctcagttgactcaaaattcttgatagctaatcccttcgcagagtgttattgggctccgctaattttgtcccccttattctttcctttgcatgtgcgattatcattcccccggccttacggctcgaagtttcgactgttatttttttctaaagttgcattgaaatatgtctgcaacaaatattcaagtttccatcttaccagcagcagcgctgtactcagcattttggtgtactcattcctttcaatgtattcattttctagtcgattggtaaacgctttcatggacatcactttgacagtgaaggttggatatatggtgcagatctagtttgcaactgtagccttctcctcacatgtcgtttgcttgttttgtgagccttgtatccatacggcaataggctcagtccactacgtagcagaacagcaggcaaatgccagtgcctcttgatgatgctagacctggacttggactgcacgaccatggatgatcgcggtcttgacaggactctgcctagcctggcgcatctaaaattcgtgctcgaaatcaaaggttggccagcgggtgagtttatggtcacataggacgcagagctctgactcaggaaagtagaacgtgccgattgaaaccgcattgggcgtctaaaagaagacggtgtagaagccgcagaagaagtccgaaaaggccgcgctctgcacgcgacggcaccagactactgcatatagtagaatacttccgtcttgactgcacatctcgaacagatacgaccatacccaaccctaccggtctgccagaaatgcactcgaaccaactaagaatgccctggtatcgtgatgagctgtcgctgatgtttcatgatgaaactgaatccccacgatcatgcaagaaataccgaggcagtgatggtggactttggggaaccatttttcagaaaggtcctcttctcacagacgtccttctctcgcggatgtcctcttgttacagacgcatttcacggacatgctcgaatgaagcagatggagtgacggataagctatgctatacctttttgtaacaccatgctttttatattcagtgaccaagggagaccatttacaaactttgatgtatagaactacaatggttcggtgtgaggcatagcacgtgatgccctacctggaacaggactagcgtcgaatttggcaaagtcgcgcagaatatcgatcccagagccattctccagctgtattctttctggatacctttgacacgatcttaactttttttctaccacgttactatatgccgtggaatcatacaagtacttgttgttaactttcttgcgcttgggccattcccaattgtgcctcactgcagtgatcagcccttcgaacatcgagccgatcaaaacaatcgcaagctcgttcttttctcgcgcataccctcgaagaggcatgttcttgtgcaattgaatcgccaacatgtctcctcttcggggctatatcagttcctaccctccgcgcatgcgccattatggaaacgcgttgctcacacctgtcaatcctccgtctcaaaccggcccgactccgcgcaccacgaagcgtggaactacagccatcaattatgctgaagacggcttcgatgacgaggatttcgatgagactgatgggccccggcgcccgacgggactgcgaagtcttcggcgcgaagaatccgccactgacaagtcggtgccctactcggagaagctgggcaaagaagtgcatgcgcccgtggaggtgcaaggcctctttcgcgagtggatgatcaagagaatgttgcgaccagcgtatgttccctattgccagggctgatgtggccattaacgacagtggcctctgtcttccctgtctatccttggatctggctaacatacagcgtggtgattctaggtgtgccgatcaactgcagattcaagcgcaactccccttgacgctcgttcccatccgaattgatgtcgaagtccccgctcatcaacccctcgaaccattccccttcccacgcgcagtcgtggaccctaacgtcacccacgctcttcctgcctatcgcagacctgaaccattacccccgttccgcattaaggatactttcttgtggaacctccatgaatcactctcaacgccggaggaatttgctattggattcgtccgcgatctcgatctcccaaatccccaggctacgactatgaccatcagcaaccagatccgacagcagctggaggaatacgctggtgttgctcttcacccactttttcagagcacagacgcaggcacagtgcccagcgttctgccacatacagagccgtcaagagagacaccaacgacaccagctgctgccgttgcgacacctgatagccggcccaatgtgacgaccactgtaactgtgacgaaggaaccgctggtgaatgacagccttttgaacccagatgacgcatatcggtgcttgatcaccctcaatatcaacctgcaaaacaagctgtacacagacaaattcgagtggtctctgctacacccacctggcatggctgaagagtttgcacgcatcacttgcgctgatctcagccttggtggtgaatgggttagtgcaattgcacatgccatctacgaagcagtcttgaagttcaaaaaagaagtctgcgaaagcggtgctcttgttagcggctacggcaatgacattgacaatttggcagccaacggcgtggaggctggctggcggtacgaccctgaaaccatttgtgatgagtggcagcctcaagttgagactctgtccaaggaggaaatcgaacggagagagggtgaccgtgagcgtcagatccgacgtctgcgccgagaaacagccaggttctcttcaaccacgggcatcacacctgagatctcacgacaggccagtggcaattacttcgaggtggatagcgagactccgctgggacgtggagaaagaaacaagcgcaagcgccgattccgcagcttgagcccttcaggcagaagtggcactcctggaggccggggaactcctgatactggatcaggggcaggatacggtggcggtggcggcacgctctccgagtggtatgtgctgccagatacatattgttggaatattcactaatgattctgcttagggaacgtcaaagctggagatgcaagaactgcgcggtgtggggcacagcagtttgggctgtgcgtgatggtccagatggcccacgggtaagtctttactttagaatgtcttgcaaacagtctctaaccatcctctgtagacactctgccacaactgtggcctgctctatgagcgtgataaggttgtaccggaatggtccaaggatcttcatcgtcacgacgtgcccatcggtcgatatggctaaatcaacgccattttccttgcatcgccttaatgtactttcctaagcttcaatgaccttcctcacgccaccatttctcctttctccgtgttctttcaacatttaatccgctattggtgcactttcaatcgatccggcgttacggcgcatcgccttgttatgttgcagatcgatttccatccgcaaaattcgggggcgttactgtcattgtgaatccacatgtttctctcagtcgacgtctttctgtcttgcctccagcacatgttttcgatggatggctagaaggcaaagagctaggaactagagtagaaatgcaatcagattagccaatgatccactttgaagtacaaccgatctttgatattgatgacattaaaacatttgcaaatggtcttgtagacttacctccctcacatccttttattgatttatggatattctggaatgaagtgaaacatccctgtcttaattatactcgacaaggtcatccttcacgacgagcctaaccagtctggcactgactcaacaaatcaaccctcaaggaacttcagaatatgatcaaagccctcaggcgccttaacccaatgcccatccccctccgcacccgtaaactcctcccagtcaacacgtcccacaatcttcctcagaacctgacaagcctgccgcccaagctcaacagatacccacggatcatcagccccatgactcaaaaacacaggcgtctccaaaaccgcaccaccaccaaccttaccctcaggcaccacctccccagcaccagcaatctgctcaaaatagaaccccgaaatcaaactccgcgtctgcgcactcccaggcccaagctccggctcagacaacaaccactcaagctgctgcgcaaacggcaaccacccacaaaagcccagcagcccacccagcgggccctgaaagcggcccgtcgccgacgcagccaggaacgcccacaacgccgtcgccatgccctggctcatcccgccgagatagatattaccgtatttcccatctagcaggcgcgcctcgtcgtcgatgatagagaggatgttggcgatggactcgcggagtccggccttctgtagctcctggtgctcgtatatgttgtcgagtgagtatgcgtcaaaccacgcgcacatctcttctttaaaggctgtgctccatcggttgcgggatgttgggaacacccagcggtaggaggggaggttggacggcaggttcttgccgttggaggtttcggatgagaagagctctgaggcgaactcgccgccgtcgctgccgcggccgtgtaggaggatcacggtgtgtgtgtgtgtggtttggggtgggtggatgtgggatttggggaattccatgcttgcgagctgtttggatatgtgtttttggtgagttgggattccaatcggatttcggtgatgtcagatatgggggggttctcagctcccccgcaagatgttagatagcggttagcgatagcggtcagctaactacaacataaggtacgttatagacgaccatcttctgcagtataaactacaattcaagagcactctcctataacttttccttcctagctaatacccaatggaacccaacactcttcccacctccattatcctcttcccgatccaccgtaacctcatcaacctcaatcccaaacccaatctcaacaagaaccctccgcacctcatccctcccccacccactccaatgcatagcgccctccgtagcccccaaccaagaaccattagtcgagctctcaaacgcggcctcggagaaattcgccagaagccggcccccaggcttcaaccagccgaatatccgacgcagcatcgtagtctgctccatgcgcggcagatggaaaatggaatacatggccatcacggcgtcgaactgctctgcgctgaattccagctccatcatgtcgcctaggatcaggtttacggagggagagagtcgctctttggccagggcgatttgtgtcgatgatatgtcatttgcggttatgctaatgtgggcgtgtgaggatagcagctgggtgcagggtacgccggcgccgcagcctagctcgaggatgttgagttggtgggtttcttttgcggagtggatggattgaaggaggaggtcgaggtaggagaggcgggtttcgtgcgagggttttgtccaggttaggtagactgaggcgatttcattgtaggcttttttgatgtcggatttgattttgtggttggtggtttcgggcattatggtggttatagtgttggatggtgaatcgattaggaagaaaaccgcgtcagctactctaggcgttctaagtagatgactcattcggtgatttactgtctataaggctaatttacgagactggtgattggatattctcttctgattgagtctagccaaaaaaattagagtaggtagctgtcatttatattaacatgaatctccccaactgtgacaccttactctctcgggaaaggccatttccagttgcgaatatgttcagcatcaataccattatcgagtgcctcggacctgcccgcaatctgctcattgagcaacttctctctcacgccatcggccgtgttaccaagagattgaaccgagtcaatggcagccatagcgagactgtatcgatcggttccattgcgcacagccagctcgaacggtgtgtcgatgttgcccttctccttgtaacctctcacgtgcaggttatgttgacccacacgcttgtaggtgagccggtgaatgagccaggggtaggagtggaagttgaatatgatgggcgtgtcgttggtgaagatggacttccatctcgcgtcggacaatccgtggggatggttgacaggggagatcaggcggaagagatccaccacattaacaaagcggaccttgagctgggggagatgttcacggagtagggcagtcgcggcgagggcttcgtatgttgaaacatcaccgcaggacgccatcacgacatccgggtcttggccttggtcgttgctggcccagtcccagattccgagacccttggtgcagtgcgcgagtgcttcgtccatgttcaggaactggatgtgctcttgtttatcggcgacaaccacattcacgtagttgacactgcggagacagtggtccatcacggacaggagagtgttgccgtcgggtgggagatagatgcggaccacctcggggctcttgttagccactacatcgaggaatccggggtcctggtgactgaagccattgtggtcttgtctccagacagtggcggtaatgaggatgttcagggacgagacgcgggctcgccactcgatttccaagctcttctcgatccacttgcaatgctggttcaccatagaatcaatgacgtgaatgaaaggctcgtagctgttgagcagtccatggcgcccagaaagaatgtagccttccagccagccttcacaggtgtgctcactgaggatctccatcacgcggccatcgggggacagattgccgccgtccttatcttcctcgaagtaatctcccatccagactttcttgcctgccttgtacacctcggcaagcttgttagactccgtctcatcgggcccgaagagtcggaagttgtgcatgttgcgagcgacgatatcacgaaggaatttcgccatgttggccatgcctcccttggttgttatcccagggacgatatcgttgaaaccatagtctcggaaatcaggaatgtccagcgggcggcgcaaaagacctccgttaccaacggggttggcacttatgcgggaggtacccgtgggcgcgagctccctcagttccggaatcaatgtgccgttcttgtcgaagagttcttctggcttgtagcccctcatccatgtctccaagaccttgagatgagcggggttttcgcgcacatcagtgatcgggatttgatgggcgcgccagaatccctcgaggaggtggccgtcaacctcccgtggagcagaccatcccttgggtgtgcgcaggatgatcatgggccagcgggggcggaagggaaccttggagtctcgggctttcttctggtatccccggatctcggtgacacattgctcgagtgtggcggccatcgcttggtgcatgctgtcgaagtcacttccctcgacaaagtatggtttccatccatagccaacgagcaaggaggacagttcggagtgactgattcgtgcaagcacggtggggttattgatcttatatccattgaggtggagaacaggcaggacagctccgtcattgatagggttcaggaattttgtgctgtgccagctggtggcaaggggaccggtctcggactcgccgtcgccgaccatggtcagagtaatgagattggggtggtcataaaccgtgccaaaggcatgagagagtgaatatcccagctcacctccctcgtggatactaccaggtgtctcgggggtggcgtggctgccaatgcctccggggaaagagaattgcttgaagaacttctgcatgccctgcttatcctgacctttctccgggtagacttctgagtagacaccctcgaggtaagactgcgacagaattgcgggggcgccgtggccggggcccgaaacgaacagaacatcgaggtcgtatttcttgatgagacggttcatgtgcatccaggtgaaagcctgcccggcatccgagccccaatggcccaagagtcgagctttgagatgctctagcttcagaggttcttcgaggaggggattgtcgcgaaggtagagcatgcccaaacacaagtacatgctggcgcggaaccaggcattcatcttacgaatggtctcagcatcgaggggctttccttccacggttgagcgagcctctccataggcggagatgctcatttcatccgggattggtgtcatgctgtgtaccactgctgaaccagacatgttgcacgatatgtcggggaaccagtccctgtgtatggtggctcctggggttaagaaagaatggtaaacactggagttggaggtaagacggaataagaacacagaggaaaataatttcaggacaaggcggactttttttttctgttaataagcgggacaattgtttccccctccgactgggagccctatgggccaacgagtcaatgacgtggttgtcatccaacgcacaagcttcgatggtgctacggcgcagagataagcatgcaatccgacccactgccctgtgcacgtgcattattctggcattcataattcttgggtgcttacgttcggtgcctgcccggtgaaaaagtaactaaaaatagcttatttatgcacagtgtaagtgtcatgatgcatcaccggagaaaccccgggaacattcgcgatcgtacgacgtcgccttcgccgtgaaaccgcctttgcccctccgaggccttaagaccgttaccccgcacccgacaccatgtgattcggccgagagtggggaatatcaagtgtcgatctccgagaatcatctcatattaagtaacggacaagtcaacagttggagaacattcgaatcaagtagcagaattcaatccaaaaagtcgcctctggtctcctccacaatcaactcgtactccggctcaaattgcatatacatggcctcgggagaacctgttttttgtttagtataatacgcaacttcatcatccaccaaggccttcagcattccttcgcttgcaccaatcgacccaggtgctatggctgactgcaccaagagctgagtctgacaggccctctccaatgcaataaaaaaggccgccgcttcggcaaccgtcccgcccgccgtaagcaatccatgattctgcatgatcaaattcttgtgcttagggcccagggcatcggcaatcagttgcccctcttccttggcgaaagcaacgcccccaaaagctcgatataccgaaagatcgtcgtagaacatgcaggaatcttcaagcgggaaatagtgtcagtgggaatgtggcgtgcgtggcacaggtcctcttaccctgattcagcatatcaattccccggccaaaagtactccaggctcggccgtagggactgtgcatatgacacacggcatgaatatccggtcgcctctggtggattgcggaatggataataaacccagccgtgttgaccggccgcaattcgccagtgatcttcgttacgcccgagacccgattgccttgttcgtcgacccgcaccatatcagagatcgtgagaaggccgaagtggactccgtatggattgatccagaacgtgtggggttcgatggggtctgtgtgtgcggagtggtgttagaacatgtacaatataggcgaaggatcgcgtaaagcaagcatgcatacctcgcacactgatatggccgctgctaccatctgcgaatcccattttggcaaagatgcgaaacgcgcccgccatctgcgcgaggagccattcccgttcgtcttctttgtcggtgggtcttgggatgtggtgcagcctatttacttcaccattgtcacttgtttcggtgttcaaagcagaagtgtttaaagcaggagtaaccggctttgctcgatctttagacacgtatgataacatcttgtgcgcttttgatttgggtgagtgaggaaagatggtgggaccgaggcaaataaatactaccccgcggaaccattggctattcgatgactcgacgatttttgtatatacaacctatcaaaggacagctacgtctgtattcgcctttggtggaatagaagggtctacttgccctattcgtatggtcctccgtaccactgtcggagattgtctttaattaactttttgggcggcagatttgacctggaggactccgtaagtggagaagattgtcatttccacatggctgcggctggacactagactcgagtccccgctagagatcatttcaattgaaaacagttcaatatgagtggtccaaattcaagaaagcaaaaagtccagagcagcgcaacatataatcaaagacaggccacccatctcgcaaattagaacagactgtgccctgtcgccagattcgggtcaagatgaggaaagtcatcaatcggacgaacacgtgcaactgggtagggcgcgttcaattgtgccggtgtcgcggtaggaagagtcctctggccctgtgggatcccagggttatagtcaaaaacccaaagacgcaacgactgatccggacaagttccagtatagaacctgtgccgcagccatgaccctaacagacgatcagcgccggcacgcgttgattgaccactctgaacacaagcggatatcgcttgccagtccggggacatccatttccgttcatcgtagctccacatgttgacttctatttctcggaatatcgaggtgactcggttcccatctgcgagataaagaactccgacgcccatgcatcggggcaaggggtatacgggtccactttctgcttccagattccgaagaacgttgatgtcgtcttcgaataggagcatatgtgtagccccggtgtcatccataaatgggaaatcaaagaaaggtggcctgcttaatggttttgggtctttttcccctttttccttttttctctctccttctcttactgcaatcgctggaaccttcgggatccgaagggcaaccctcacctaaagaggatgattagagagatcactaaagtggccaacagggcaattgaaagggaatagctaccattgtggcattcaaacgtggatccggttggcataccatcgaagccttgctcatgctaggcccaggcccgagaatctgagtatttgttttagtatatctatcgacacagccaagggtctgacacttacaccttcaacccaaaatcctacatgtccctcgtacttgtcatggacgtagcggtattcatcccagtggaaaggtctcggcaagcagagctggactccagaataccagtaggtgacaaggtccggattccaactcaattccccggatcgataccttgcaatgatggctttcaccgtactgaccatcttgtactcgtcgttctcccccgcgagttgatccaatgtgaatttgagatcatctacgcgctgtgcctcgggccaactcaaacctggctctctagccatcagtctcctgggtaggaaggagtaaattagtctctattggggaattcggagttataggatggctcactcgcgttgcgactgctttgcaatgaattctttcattttatgccgataaacatgaggcatgatattctctgcgatccgctcacgacacctttctatctgagctttgaagtcgctgcataaaaggtcaataccaagtatgaaaatgaagtgagccagtatcaactagctagagcaggttgaacttactcgggcatcagatcaggctcctctgggttccagcctttaggcgtgtcttcgagctctgtgatgacatcttttaccattggccatttctgtttcttgggaatttcttgtctaggcttcttccaggtcttcgagtaatcaaccttgagatcggctgcaagaagttcctcgtttaggagttgcgggattcccgtttctgtttttgccttcttcggggcagctccttcatcttccttcaagcttttcttgcgttttgcattgaccctcttgggggcacttttgccgtcaagttttgcggcccgggggagagtagcccttggaggcatcttgcaacagaagatagtcacgaccaaggtgctttctctatgtaactagcaggtcgaatattgaacataaatgaatgatgagtatgaatgacagaattttgagggtatttgtattccattttgtgtacgccgagcccatcgcaccggactggggtttgactatgctgtcaaagaaaacttaaaaggtggtaaacaagatagaacaaagacaggagcatgcccttggagagaggtcgattccacttttccgtgcttttgaaacaccttattgagtgtgtttttgcaaagtatactctcagtggatttgactattgcaaagtatactctcagtggatttgactaggacgattctccaatatgattttggctaatttctttgatattgacagggcttatgctgtttgctgtttgtttgggctctgtctgtgcgaccttctgccgctgtacctgatgttaaaggattcaaagcagcaggatttgtcaaacaaagacttgtggattcaaacccaaagttcagatccttcactcggctcactttcaaaatcatgaaagaacattggctaacttgagctgacctgtagtcatgagaatgagagctgaaaatagattgtggcgcgataaaagacacgtctcagggcgagaaagtgtagaggctggagagccatggagaacaaagaagatctgattcttgccctgtttatttttacacaactcggtatctttgcccagtgcctcacatatgtgatatattcctctttattaagtattttcttatcgtggagtgggtaagctgttgagcctcagtcgcacccatactgatattattgagcagtgctttgttcatcgccagagatgcttgtagcgaaagcctgctgaagctcaatgtcatacctcttcttatcagcaagtttgcctatcacgaatcttggcaggtcttttacccagtaaaagggcatggtttcaccaatttcatcggagcgatgcttagacaacaagggctgaatatgcgaataaaacagatggaacaagccggtcgggctggaaaggccagggaataccagaatgttccagttttccatgcttgttccataacctctgatagtagtaatggcgtgctcccgacctcttttgacaggatactgctagacatttgtgtctcctcactcttcaagatagacatcatttccttgcgagcttcatcaaattcatcgacttcgatcatgtccacagctttattagtcaaccagtaaggaggtgcgaccatttcgataggtagggagcaagcccattccagatcgaccagacaagtgatatgccacttgtcatcaacaaaaattttgctttggtggagatctgtaagtgtgagaacaaaaggcccacgacacaaatctcgacgaaaaaacactggaattagagttcgcattgctgccagtgctgacatctgataaacgcagtcatgtatgtcattcacggaatttagttggtttcgtagacgactgtcatgggctcctaggatatccatcacgtaagactcaaccgtgttgtatgtatagtcacgggatatgtgggttggaacgttctcattctcgaggtcctgaagttccatcgagagaggacggttgcttagagttaggaacccgtccctgttgatgatggatgaactaatgcgaggcaggggggttttgctgaggctcagaaagatcctggacaagtcccggaggaaattacaccgtaactcgctgtcttgttgtttctcggaccatgtattcgcaagcattgtcccttgggtttcttcgatgcattgtagcaacaagtatccagcactagcaacgcgaccaggaagcgcttccgtctgatttggattgaggatatagttcgaaggtactgggaggcaaaaccagtttagtagccggcggcgtagggattggaagcaacggcccggaaagggcagttggtccaattctgtgaactattctcgacaattagattaatatattggagatggagtaggtctcgtacagtttcacctgtagacaacgcgaagccatataaccgtggaattggaatatccgggcaattctgctggagccatgcataggtcccagcttcacattggatcttttcatccccgttcccgggcctaaagtcatccccgatacggtaggggagcggaaatcggagtatgacccgttttcttggttgctgtctactgttctggatagagataggaatgcagatattgaaactgccacggagccagtacctcacttctgaaacatggcacttatcgcttgagctcagccctagtggtgagcaacagtagctttcatccactcgcgtctatcgtcgagatatgaaaagaagcggtcttgttggccatagtagcccaaatggtggagtatgtcactctcctgatccttggcgaaagaataggtaatttctcccttgagaaggcggcgcgtcatgattgggagcaaaccaaggtgctacccggactagtattgactttggctgtgtccccacaaagcagagttcgtgggtgagatctggggaaggggcgatcctcccgggacggacagatgttttgccgaagtagcgaatatcatcagccttcgggcacctgacagtcctggaggtaagcttagttactttgtttctctcaaaatcaggtgttaggacgaacacacctcgaaatatatagtcagaatgcgagattcgttgatttgcgaaaaagctataaaaccaaaagtcaaccctaaacacaaagccgtatatcttgcgaaaatgtaaggacgttgcgatacgaagtttagctgtagttccatatctcgattatatgcaatcgatgcctcattcaagcacctttgcaggttactggtagcgtcaataatctcacactgctggtcaaccgattggccgattcagtacagtacccagaacaggcagttggttattgcatagcgtcggccctaaatgccaaatctaaatatcaccgttttcatggtagtaaagtaagaagaagcatcaaactagatggaaagttacataacagccatctagtatacaacgcattcataaaaggacaggatatcagctcataacaaaccaaccaaaaattgcaaaactccgctaagcaaagggagtgaaaagtgagcaaagtctaagagaacaaaaccaaaaagtgacaacattctgagattatcgaaagcaaaaagcgggagacattcagcttctcataaagcaactcataacctatattcaagacgaacgggagcgctgagtcggcggagctcccaaaggctcctgtattgatcagtcagtgatgaaacctcttgaagattcttttgcggagtaaagtacgaaccgagctggcacgacgcttgcggccgcttcgttcttcgccgacgttgtcagtctcattctcagacctgcgagcctcgcgcccgacgcaaatgctgttgtttcggccgttgacccggatgcccgagagagcgcgaatgttgatgggccgggggtagcccacatcgtcgttcagggcatttgcgcggctcagcgcagcgatgatgacagccgccatagagttaatacggggggatgttggggcctcctggggagttgaatcagtgggagtatcaactccagaaggcgacaccatgatggtgttttcgtcaccagttatggtgatcgagttgtcaatgtaaatattgattggggaagcccatggctcgtccatgtcgttctgatccacgctcatgacagttgtgccgctgggtctggtcacagacaacgtgtacgggggtggagctgtgcctagagtggacgtagaggcagacgtagatatagaagaagtgttgcgatttgcccggacttcggcgagcttacttagatggtgtcgcaaagagtctgatggaggcaacattgtgaatgaagttatgatactttttagtcgtgtttgtagatatgaccagagtgaagtatggctgagtgaagaagagaagtgcaacagcgggttatctgagtatttatggtcaagcgtttgttcattccgtttgaatgggcgcaaacaataggaaaagtacaatcaataaacaatcaatagacagccaatcagaggctgtcaggggccattgacttgcctaattgggagccttgaatggatttctattgttctcaatagagatcacgtgactgctattgttcatggggtatcaatagaagaaaaactatgtacctggtaccttcgccaagatgggcaccaccgtaatcaagaaggtacatgtacatccagtaccatggtttcgctagtgtagaaaatgcgcctccaattgtcttccaaaaaagcaaaccgggacgctgcggcggtccaccagcccctgactgtggagcagtccttcgtagagcgtgtttgtgtcactgtaaccaaacgaactggatcccagatgatcggatgttccttcttcggccggtcggaaatctctgctgatggctacaccatctgggaagtgggcacgtctggtcaggttattggctggtatttcacaggcgcagggtatcaaaccctaccgataaggttgtgtggctccttactgctagacgggatatcggagccagagtggtctgggtgaggttggcccgggtagtatcgaccacctgggtgaagtgattgcaccgtctgcaaatacttattagcaaggacaacagcccttgtagattgcccgagttataccggtgtttctgtcgcgtccgacatccgaaccgttacgggttggtactgacttcgcggaaatcatccccttcaacttccacctcgcgatctcgaatccggcgcatcaaagccatgaaattgctttgttggaatttttcacttgtttcgttgcgcacgctgtcgagcagttgccctgctgtccgcgcaagttcatcggcatctcgattccgtgtttctggatcctgcttttcacttttgggaatgagatccgatccgagtcgaatatgctcttgggtaactggctcaggaatgccgacttcattggtctcctgcgactgcttctgagtatctagttgagcagcatcgactccttgcaactccatatctgcccgggcctgatcaaaggcagcctcaaaggcggattcgtcaaactgttgcatgtggtgttgctcagtctgcataacctgcgagggctgcatctgattcatggaggatccatacatctggtagcttggtgcaaaagctggttgataggcaccatgcatttgcggggtttgctgtgtctgggacataggccctcgttgttgggtcatgaattcagagtgccacccgccatgcgccgtggctggcgcaatatttggtctttgtagttgcgctacagggtgtgcgggccccgagatttgcaagttctggaagtccgatgcccaactggcgttggctgcaccatgtgcagctggatggtgtactgcagcatgatgtgatggtgctccaaaatgggccggatgttgtaagttaggcaatgcagggccagcaaagttgccttcgaatgcggcgaactccgggtcgagtattccttcttgggggttctgggatcggaaaccctgtagtatgcgtttagcatgaatgaaacaatgcaatcccaaaagagctaccaacctgagcaggcgattgacgggaagtcaaccggtcttgctgaagggtccgatcaacagaggtatgcttctggaagttctgaagggcgttcgacggcccgcacagcgcatcacccataatgacctgcttagatcgaccaactgagcaagaaatgtgatatggtgactgtggctttcaaatctctctgtaatcagtttccaggacagattgcagcaaatataggaatgaaggtgtcggacttcaaaagaaactccacgccaccgcgtcgtggggttaccgatgaccgaggctcatcacgtgcatatatccaggtaacgtgacctagcacacgataagatacgggaagggccaggttgtttggctaaaagggagagagctaccccgactccgcgcgctttcacagctattaacttcttgtttgctttatttattcaacatggtaactaatattccgccacattgctttgagcttgttccacaatcccatcgctaacagcttcaaacctccaggcggcccctcaggtgatctcgaattccggacacgaagagatgattgtatgtgctaagataggaattgcaactggtgatctatgtggttacacaatgtacgtgagctaactacgtatgttgaatagcacgatgctggcttggactattacggccgccggttggccacatgttcatccgacaaaacgataaagatctttgagattgagggagaaacacaccgactagtcgatacactgaaggggtaagctagtcctatcgatgtgtgcaactgggtgttttgtctctaacatttgtggttgatagccacgagggtgctgtgtggtgtatcgcatgggtgagttgacaccaaaacatgagcaattatagtgcgcaatgtgactgaccatgcgattctctcgatttaggcccaccccaaattcggcacaattctagcctcatcttcctacgatggcaaagttctgatctggcgggaacagccccagaatgcgacctcgccctccggtggtagcacatggactaaggtcttcgatttctccctccacacggcctcggtgaatatggtttcctgggctccccatgagagtggatgtcttcttgcctgcgcttcttccgacggccatgtcagcgtgctcgagttccgtgacaacaactggacccaccaaaccttccatgctcacggaatgggcgttaactctatcagctgggcccccgcggcctttgctggtagccttatcagctctaaccccgggcccggccaacagcgccggtttgttaccggtggcagcgacaacctggtcaaaatctgggagtataagtatgtccattgataaaactttccaagcatacagctgtgacgtgaactaactcgttctttagcgcggagtccaaatcttacaacctcactcaaaccctcgagggacacactgactgggtccgtgatgtggcctggtccccgagcatcctctccaagtcctacatcgcctccgccgcgcaagacaagaccgttcgcatttggacctctgatgcttctaacccgggccagtggtccagccaaacattggagttcgacactgttctgtggcgcgttagctggagtctcagcggtaacatccttgccgtcagcggaggtgataacaaggttagtttatggaaggagaacctcaagggggagtgggagaaggtcaaggatatcgaggagtagtggctgttttaatttctatgtgtcatctattcccttcctcaacgcataattctgttctattcaaaagctccattgcttgttaccataaatattgattccagcgaatcctacgcaatttccagagctttgggtgagcttgatatgtttcattccctatctcgtccatctcgtccaccgctcaactcccagaaaaacaaaagaaagaaaggcattaaataaaggcaaatcaaggcaaataaaagagcaaataaaaacgtagaagatatcccgtgtgtctcaagatcagcgcatgactggcgctagccctcacacgtcccagaagatgaatgggcctctggcacctgtttccttcatatccaaccaccgtccaagcatcaggcgcccaccggggatgataacagcctcataaccatggatccagccggggccgtccattacgaggggggaatgcttctcttcatcatcttcatccgcttcggcgatgataaaacagatccgcatccatccctcaaagccaccatgtgaaacagcaatctcttcggtaaacccgaatacgtggtttcccgcctcatgggcgccactataggctctctgcttgccatcgaaatatgtccgtttgatattgcggcctttagcgagaggcatgatcttactgcattgcttgggccaaaactcttcggaggttgcgaggtcaagggtctgacatttgttaatatagccttgcaagaaactcgccttccactcaccatgatctcgaccccgtcaccgtgtgtctcaagatcagcgcatgactggcgctcgttgtcttgcaggtctgatatcggatgcatgcatgctaattgaaatttgaaatcagctcggggtcatgattgggttttccccctgttggtatactcacagtagtatcctagccacgatgagcttagtttggattcctcgattggaagctcctttcgtgtcttgggcttcatctctgcaggcagcgcggagaaggattcctggaaggtgaactcggaggtgttcaaaagatgacgttgccagaaattgcgcaggttcagcagtttgacgagatcgagctttttgtggtcgatatatgccttgcccagcttctctccatatgcgtaaacctgtttgatgtcgtagtcggttcgacggcagtgatcggtgatcgttggatcgagagcaaacgcactcaggctctgtgtatggatatcagtgaatgtccaatccattattcgacgaaacatgcgtacaagctggagaccataaaagagttttgaggaaggttctttctgaaattcgctcaaaaaatccaccttctcgagtttctcctgtatgcattgcagggtctttggggtcgatccaggaacgatggttagttgcagagactcctcgagcatagtctgcatgacctccatccagaggaattggcgatcatcttccttctctttgaatctgatcgtagcgcccagcacaatggcacggatttggtattcgatcttcaactcccctgaatttttccccggaacaatatcgtagtgtttaccaaagagatatcgccagacggacgagtcggacccgaagaccttgttccacatctctttgcaagactgggagagatggaaaacatcacgatcgttagggagatagcatgcaatgtcctggagaacctgttgttctcaaacattaatagctgcaacctagaactatagacatatacttacctcattcggaagctcgagcagtcggcttggagcacttggcatggcaactgaatcggaccgcacggggttgttggacgacatgtctgtagttgcggtattattcggtatgtatacctatgtacttcgatgtgaggcggaagatgtgaacagaagacgtatgtgcaagaacaaaattcagaataaaaggcgatagatattcggcgcgaacgttcatgtatagcattcggtgtgtttgtctatgcactttgatgtaaggtagaagatgtatgaagggaggatgtaagtgcaaagagcgaatttcgaatcaaaggcgagaggtattcggcgtgcgccttcacttgtccatgtggtatagcatttggtatgtatacctatatgacgtgaggtgaagatgtgaacagaagatgtaaagtgcaaagagcgacctaggaataagaggctacggatagtcagcgcacacgttcacttatccttatgacatagcattcggtatgtatacctatgcagttcgatacgaggcggaagacgtaagaaagaagaggtaaaggacgaagagcgaatctgggaataagaggtaatatatattcggaccgcgcgttgtcttgtccttagagtgattcatttcgaatatgcgatatcatttttgatttcagttcgaacatcgggacaatatgggtccgcaactaaatcgggtgaagctacttatatttgcgtgatgagattcgcctcacaagtgacagcgcaacaataaacgataaagagcgacaaagaggtccgcggttcgaatttacctcttcacgttccagagattgatagattttcttcacacgctatatatgccgtgagaggctatgtcgctgtaagctttctttcacgccccagccatctgctaacaggcccttgacttcctctaggctaagtccactcatctcggggtagattgcccatacagcaacccatccacccacacagacgagtgcatagagagcaaacgtccatgagggagagatcaattccatcataggcaagaaagtaagaccgatgataaagttggatccccagttggttgcagtggccagtgctgaccctagggaacgtacattcagagggaagagctcagactgctgccaagggacgttgccgagcccaagggcatatgccgccgtatagacagtaaggcaaagcagaattgcaaggggcacaagggaattagtgctatcatggttttcttggtgatcagttggaggttgtggattccatttgccatccattgacgagaacgagaaagcacagacgaccagagcaacgaccatgacaggtattgaatacaggagaatgcgccggcgaccgattctgtcaatcagcacgaatgcaagcagcgtgaagataaagttcgtcatagccaccgagagtgatgtcagtgtcggcgacgagaacgaaagagaggagaagatggttgccgaaaaatacatcaagctgttgaatccgcagagctgttggactgcctggagcatcattgctatgatcaatgctcttctatttccaccatgcaacaactgctgaccccgttggatggtatcatgcaaccactggggctttgtgccacgagacttaactggtcccatctccgacgcctcttggacaatttccgcgttgatattgcgcaagacatgatccaccacccggtcacatccagggcaatcctgatagatcttggacaggactgtcttcgctcgggcatcaaatccagcctggagcagccatcgaggcgtctcgggtagcagagcgaggatggcgagttggaaaaaggccggcaatgcaccaattcccacaatccaccgccaacctccagttgtactagaaaacagccaaccgactatgtatgccaccacctggccaccggtgatgaacagactgaggatcgtcacaagtcttcctcttgcgtgtgaaggagctaactcggatatatacctgattacctagcatgttagcaattaccatctctcttgtaatcaaattgatgccatggcacaggttctcagtccccgcctgacgacaaggccaacctacaatggagtcaccgcactcgcgctaccaacagcaagaccaacaatgctgcgtccaaggatcatcccccaaacctggcttgtaaaggcctgtaccaatgctccaagtgcaaacaacagatccgccccaagtatgactttccgacgaccaaacttgtccgccagcactccggtgaacgggctcgcaatcaacgcaaataagctagtgcatgatgtaatgaggcttttatcgagtgttgtcaatgttcggccggaaaggtctgacccgatggtcaccaaagtagacgagataacacctgtactggaagtttcaacgattgttagtgaacgggaagcaatgaagccggaacatggcgtgtttggtagtagctagcatactcatatccaaatagtaggccgcttatcccagcggaaaaagtcaacatccatatgaaccagcctcctgagtattccagctcagaggccaggctctcatcgtggtcattgccatcatggtcggaataggcgtgggatgaggcgagcaaaggggcgtgggggcccgattggtcttgctcatctgcgcctgtcatatcttcgagctcttccaacttgatcctgaggtatcatccgaattttcaatgttatgcccctgatcccccgaggcatctgagatggtaaagtgacgtccggggctaatcgcgataagccgataaggagacgctcaaagcccgaagcggaactcggattccgcacgtcgatacagttcaagaacaactagagatctatttccatacatatgcactaggatggaatgaaggcctaatatatgaatattgggttgcagaatactaaaagtgtgtaatttagattcatgcaagattcattgtttttacggcattaatgtatacatatatagccctcctagcctagtgtttagccacaacaccggcagaatcagcctgtgcgctgatcttcttcttgtatgcactcacggtgccgtcaaacttgtgaacagtaccgccgtcgcaaacccagagactagtgcagacattctgcaacatggtgacatcgtgggaaaccatcaccacacctccctcgaacgcccggagtgcatccgacagagcatccataccctcgatatccaagtgattggaaggctcgtcaagaacaaggatatggggattggtcaaggacaagcaagcaaatgcgacacgagatttctgacctccggacagtaattccatacgttggagaccagttgtaccagtgataccaaatctataatatgaaattagtcaatgcagtacatgcgagtggtcaggataaacttacgctcccaggtgtcgtcggtactcctcgtcggttttaccgggatatgtcttggtcatgaagccgactgcactggcattcatgtccaaagcatcgacgtgatgttgggcgaagaatccgatgcgcagtctcgagtttgtggagatgataccgcttgttggctcaagctggttggtgagtagtttcaggactgtggtcttaccagcaccgttaggtccgacaattccaatacgcgaatcaagttgaacatccagatcgacatccctgagaagaggtttgtccttggtgtagccgaagcaaacatcagacatctggacaatgggtggtgaaagcttctcgactccagggaaggcaaagtgaacggtgtactcggcctctggggcttcgagaactggcatgcgctcaagtttcttaattctcgactgtgcctcggaggacttcgcggcgttgtatcggaacttatcaatgaatgctgatgacgatcgttaacacagctacgacaagatggagggggtaacgaaccttgcaagtgagctctttcgcccaactgcttctcgtattcacgcttagcagtcttccggcgctcctccttggtagcgtagaaggattctgcagattgttagaacaattcatagtcttgagatctgatgtaacttaccgaagttagcacctctgtagtagtccaacctctcagagtgctggtggataatatccgtggcgacttcgttcaagaatgcacgatcgtgagaaaccacaaggactgtgctagggtatccctgaaggtaattggaaaggaaagtaattgacggaacgtccaacatgttagacggttctgtgaaatgtcagtaggccgcttgtagaatagagagcagtggtaaataccgtcaagcaaaagcaaatcgggctcgcagaatagagctcgtgcaagagacaaacgcattctccaacctccggagaaggtcttggtggcgtactgctggcgctcttgggagaaaccaagaccagccaagatactagccgcacgagattcagccttatcagactccatttctgagagctttccataaatatcgctcaaggtgatatccaggccctcgcgctcctcgtcaagtctagcagcatcctttgaagtatccgccaatgaagacctttcttcttcgatggctgcaagttgttttgagattttctgtagtcgttagcaatatgccgctgtgacatcttgggacttgactaaccgcttgctcggataggagatgtttccgccacacatcagcatccaacactgcttgcaaagctggtgtatcatcaccagtaatctaggatagaaagtcagtaagagaaaaggcaaccgagctggatttgaacatacctcttgctcaacgtgaagaatagaaacgtgagtcggaatcgggatttctctgcgactcaaagcacgtaaaagtgtagatttaccgataccgttctgaccaacaagaccgtaacgacgaccataagcgagtgtgaaggcagcgtctgtcaaaatgcgcaggccactaatcgagatatcgatgttatccaacttgatatccttgctcttggcctgggagtccgagcccaattgaagagggttgacagccatgaagaactcctcgtaggacatagcctcgtctggctggttgagcagacgggacgcctcgtaggtaacgttcttcatggacttcttgtcctgcttggcgcgaatcttgcgctcggccttctcgagcttcttcttgtccaccttggactccatctttcgagcattggcagattccaagtcgacagtgtttccagtcagacccagtgtagaagacatgttccgctgcgcaccgacactgatagtctgatcaagctttttagccttgaagggcatttgcctccgctccggatctccatcggaagagctcagcgtcgtaatgaactttgcaactaagttgccgatcgcttcgtagttttgcggggagaaatctcccgaagcggagactaggaggttggtcacggattcggcggcctctgccaagggcgactcggcactggcatcgtcgacgtagaggtttgcggcatgagtcaggtagccctgtcaaatagtcagcttcaactcacaatccttcaccgcgcatatgtgcggagagacgtaccactgagtattcggtgatgatgttgtcgatgccagggatctgggattggagttcggactccatattgccaggctcgaaaggacgtattccacgccgggattcggggagcttcgaggtcaaggttttgtggagttctacaattgatgtccccaccgtgaatagtggcggatttttgtatgtgttatcgataagatcacatgatatgagtgtttatcgttcataatatcctcggaaagcttcttatgttaattgtctcttgagataatgtgacagatattgaatgctaagtagtgtaaatcatattcctagctttgagaaacaccaaaacaaatgagaggcagctaggtagtgatttctcatatatttgcgactactacactccataactaccgaaatataagcgatttccataacctcaacaaagaactttatgaccatagctttgtttcgaagtacttgatattcgaagcaagctgtcgaaaactcaatctagacaaaaatgagattgaaagtagtttgctggctgtatatcgccaatcttcgcatgaagctgttgaatacgaggatccatctatattattagcatcagattcccagccaattagttgattgagcacagatactgtagccaagttcagaatgacctcttggcatttgtgatatacttgcatacgggaaacaagcatcagatcacccgaatgtcacacagccccaatatttgaagtccttaagcgatagacaaagtacagagtagacgtagcatacgggcgagtagcataatgatcagcttagctcctgcggcctctccggtcacgttatgagcaatacgaggttttgcgatgatggacataagtaaggttcagatctgaccctgttgcccaaagatgtttcggctactctgtgcagctaagagcgatagacatagacggtgaagtggaagatatggcctgactagattactctgcatcaatgactggactctgatgaaattacttaaattagatggctcttgcaggcaggttgtaggtgtttcataagcagtttcacgttcggagaaactgcattggaccaatgagcagtaggtgaattatgaacaacgcagaggtatcggttacttaattaacaatcaactgcccaatgaacctatacaagcttagaatctggaagctgttcaaaacgcaatttccacccttcaccaaggtcggaaattgcaaagcacgggcgtgcaaaatcggccgagggtcggaaggccgagaattgatgtcaccagggctagaggtgaatggcatctttgtttattatgtgattcttttccaacaatggtcagaaatggccattcgacctggatatttcaagatcaccaacagtgcagggaatatcttgttccggtctgcaggtcgctgcagccaacactgatataacgggtgacgacaggtgagaaaaacaaattaaagtattgggtcatagttacttatgaacagttgacacgggatatgtaaacgtaaatcaaggaactgtccggatggacgctccatatatcgaccttcctaagtgaatgattggatctgccgatcgctagaagttcaggtattatgtagggatcggcctgaaccgcctttcaggtgaaaaaaaaagagagttaaagagcttgaacacgaggtacttcttcccccgctatttgagacactattgacggttaactgccagagctagaagtatgagtttggaattaggaattgtgcttcatcaggttcctttgatctgcaaaggggaaaagagagaaaaggggacttttatatatagtaatgtccccaaaaacaatagcaccgggtactatatcgggttaatttataaaatcgaacaggtcaactcttgaacctaagatcgtactctaatcttcggaccaaattcggaattccaggatcacgctcttcaatatagcaatttaaaggtacggggtacctgctggagcccttgcattattgaacctcctcgcaacgctttcagtccattctttgtcggatatttaattccagaagcaaagtcagcaaagtcagcaaagttagtaaagttggttggaagtggatctggatggtgacaaaccagcttttcactcggcacaaagtataggatgacagcttaaccgagttgatagtggatagattcctgaacaaagcctaaccgatcatcctttgatccattgttaatctcaatggaccatggttcagtattagagaacggaacacctgcgggctattcatagccagtggacaccgatcggcttgagggccccttcacgatgcgactaacgatcctaggctagggggccgagaacgcaatctcagccagccaacaccagatgtgtggggaattctggatcgcatggctttttttggggcctagtggcttctccatttccctgctctttagggtgctcggccagtcgaagcggacttctccggttgcttgaaatgtctggactatgacgccaatacaaatgtgagccgcaagggacgtctgccaaattggcgcatcctcctctggcctgcattctgcatttgcaacacctgcaggatcgtgcaccagagctagtaccgtttcgtgctgccctgaagtgctgtgcaaatcggggtattcctctcctgtctgtagaatgtctggtttgttttgatagcagaatcttccctagatcttcgatccccggtgaaatctttaaatgaatgccatccaaagacagcgacctacttcataattgatctaagatcaaataaatcacaaaaggacccaaggagggggagttattgaaagttgctcctagcgtgcgcagggcgggagttgataatccccgtgtgttgttgttgatttccccgggtcacatccacttcgtctggtgttctccttctttactcggcctcccagggggtagaggcatattatttttcttggaggctttgctcggcgttggccattcactctttattttttaattctttttcctttgctttgtctggaacgtcaatcgcggcctgggtgaggcagcgcagcacttcttcatcaccacccggcttgcgcaactcgcaattcgccattcgacctttcatctacctcttcatcgtttgcctccatactcttttgtattgtgcatccatctggaatgtcattcacggagcttatcaacctggagctgatcgtcggggtgtttgacatccttagcggcgtcctctgaggatggatcacatctcaactgtaagtccccgagttgatatcactttgcaggacggcggcctggtcgcttcggaaccttcactaactagcatttttagctctgtgcattgagcacagttggaatagctcccaccggtcttgcgctcggtcgcgccgaacggactcagaggcctgggctctttcggcgaaagactctctttcaggatatcctcgagccgctccctaataacagtgaacagacagcagtcgcccggcccaaaaccgctctctcatcccgcagtccggccgccgagtggcttgccgcaaaggaacaggaaagcttgcagggaaaccaagaatccaatctgcgaaaagcgcccttgtcgttcagcggtgcaagacgccgccgtcggggtcaaactctcacaaacccacccctgcggattccggaaaatgagtcgactgactcgccggtcgaaatacaaactcagcggccatcctctggttggctgcggcggctgtcgatggcctcgttccaagctgaaaccccgactgcaggtagtccaacaacgccctcgttcaatgggtcagaaagcccactcgttcctcgctcgccctatctgcgaagaaccccaaacaaattggtgaagcgaccggcttcgcaacatacaaatacgcatgctctctgcatgaaccccatctctgaaccgtcgccggctgcgctgcgcaggcccgccactagtcaccagaggtcggagtcgatgttcctccggacttcctctacaacggacttcaatgcatactttccgaagacgcctgtcgaaggtccagcaatcgaagaattcgagctcgaaaagaagaagcactggatgccattcttcgttcccaaagctgggaaattagcagagaggctttcgcgcaggttctcgacctccactgccccaaaggttcagagtgtacgccaaattgcgtctgacaatggcgctcttcctgtgttggttgcggctaatatgatctcccccacggctgctgcgccagaagacatatcagtacctaataccccaatcgaattccgcaatccgttccaaatgcctatctccgagccaactcccaaggagtcggtcgccccggaacagcaaacagcgaaatccggccataaacagtcatactcggttaacgatattgagccgaaaatcatcatggcaaacacagtcactgcccacgggacaccgattatgggacccgttcgcggcggctctctgaagcgagtgaagggaaggaccttttcgatccctgcctccgagctctcaatggaagagcagaatgtccctattccgaactcctcggagccggagccgcggcgcaacatcactgatccaagcgtgtttcgtgccccctatcccacttcgcaatctggttgggctgactcggctttggaaagacggtctcaggttggtccccgatcggtgtcgcaggactacagcgttggcttgggacctcgggccggtgcacgtcaaatgacctcggatgcggtcgccctgtcggcctggcagcaggcatctcgtcctggtggtcgacctcatggttcccttcgtcgccgtccgaagggattttcgatttcatgttccgatccggcttccaccgtcattggctccgatgacactcaggtgtttacatcgtgcgatggatatgagacggactttatttcagactattgggactctgtccgcacacgtgaaaccaatcgcagtggactgaagggactgcggattgagacgatgtttgacaaggcaggtacaagcttggtgaatgaagaagccacgaccttggagtctctcctcccgcggggctccttcgccgctcggtcttcggacaaggatccccaattattcactgatccgcttctgtcgtcccctcctttggttcaaacatccatggttgaaactccgttcgtggctgacgatgatgctttcagcatgattggagcgcttccgagcaatgatcgtgattgtttttcatcttctctgacctattcattggcgaaattagcagagcagcccgactcgggcactggtgcagctaaggatatgtctgaatcggtgggtgacttggagtcggatgtcaacaagaaaacaaacatctttgactggtcggaacacgcgcaccatacccgcgaaacttcagactctgaggcgcgtcctaagactatgcagggaaaacaagagggggttgttgataggagccgggctgtttgccggaaagcaccatccactgtccaccttaggagccagagtgtccctgtcgccagtgaacttcccatcaacgaatcacgtcaaacttctggcaagtttggtacttggggattgggaactaaaggtgtgagtgaagattgggacagcgattttgatttcgacgaggcggaggacacaccagtcgccgaagacaaaccacttgttgagcccgatatcaatcgccagagcatgactgttcccaaggccattctggagcgtcaagcaagtcttcgtggtcaatttgggcaggttcaggaattaaccatgctggtggaggaattgaaacgtcttcggcatcaggcaaatgtcctccgaattgtcaacggacctgccagtgaattgtgggcagaagcagagcagatcgtgaaccttgctaccattgatgatgatgaagctcgtcgctcgccaccagggtctcctcaatcccttactttcagttttgatgaatctgacgatgatggccttaatgggtcgtccaagcggaacagcgaagtctcctgggacgtgcccagtggtgaaaacaaagccatcttgcccctcgctcagctcgtaaaggactcccaaaagtccaaatctgttcttgatatcctccagcctcgtggtcaggagcccgctttaggtcttgacgggtcagaattggcatcacgcggaaagaaacttccgtttgatacttcctcgttgaagaatttggtggttcgtgcgggtgtggtgacgcgggcgttgaaggaagttattcgcaaagccgacggggtggcagacagccctcaggacttccaagacccgccattccgacgcattttcgacaaaccatcccacgatgatattgccagctttgaggcagcgctggctgacatgtcctaatcaacttttcttatcttttccccaccacatctcaatactcactccctctcatcatcttctatccgccaaccacaaccatgagacgaaccgaaaaacacctcaagatcatttggatgaccatcttctccatccctacctaatgtttacacctgcatgatctcggagaattccgtccatttctttcacagtgcgatctgactcaaaacgccattaccctttttccattctcgtgtacaactcttccccaatgtacattgccaagaatccggttttccctttcccaccctttcatgtgtgcatgccacatacgagtgcccattgggcccatgaccattctctcttgcgtcatcttccccttcctttcgtccatgttccatatttgcgcagctcatatttcctaattgcgctgtatcactcacggaggatcccttctacgggatgatcctggtgttttcgaacgaagatccccatatcaggcaagatgaaaagcgatgaacttcagacgcgatgattaacccggggacgagcccggaggacaaatctatgaactttcaatcctgtgcctaagcctaatacagaaatgaaacaaaccttctaatctcatggtccggattaagcaatcctgaagtaaatctacaagagaccaccgtcctggacagtatagaggagtggtgtctaaccccaagaagctttcgggcagctattgatactcggtgccagtcgctttgaaatgtggtttgggaaatatatactgatgtccagataagtcgagggttgcttccttagacaattggactctccacgagtcatcttcaatttctacagtatatattgaactttgaataaataaggaacaggtatatcttccagttacttatcaataaggtccgaagccagatattgatgtgcaagaacagacgaatcctcgctctgctcaacggttggagctgatatatagatacaagtataaaattatgataagatttcagtctagaacgcagcggccatcatttctctacagtatataaattaagtatccgactagctccgaagttatttagctctatctgatgagttcaatagaggcgttttgtggctgtacaagccctgcgcatcacctgggcggacaagataaacaccattagagtaagacgtagtatagttaatccgagtattatccggggcactaggaaatgaaggggccacaccggtgttccatgttgaggagatcagattcggcttgtattgatctattggtgatcaattgaggtcttggatgtatggagtatgtacacattaagcattagccaatgtcgatgtccttggcatagcctcataggaacatatggagtatagaaagaaaagaagaaaaagaaaaaacggaaaagagaaaacccctgccttacatgagcgatacacgtcaatacgcctggacggcggtaataaaacccaaatacagccactcgtacgttacccaccaggccactttccggttcaggggcagcccgtcgctgattggctgacgagatagcgggttcctctatcttgagctgcgctactcgcctggtccccccaaggcgtgtcttaccctcaccttgcttggtgcagtcggcctcgcatgggggagtatcaacaaatagatgaaaaaggcgaatgatgaacagagcagaataaacacagatccaaaccgagacaaaaacaatggccaaaaaacagggtgttctaaattaagactcaggggcgagatgcggagatgaagtacctgtacaatacaacaagtctcctgtataatattggccgctagtccgctattctagaactcaactcttctctccttctcctcttctctttctctctttatccgacattcattcccttttggctgctggccgccgctcttttcgaggaccccccgtcctacacactctttttttacattgaccttatattgcttgtgacactcttttttaccagctattccgtgattttgcaattgtgtggcccccattttaaatgacgagcattaatctcgaccggctatcgcctttttaaacgtgttgaccggtcctcacgttcccaagtcgggtctattcctatagaccagactacaccaaccatgtctcatgccggccacgcccgcctggcgatgcggaatcacgttcgtcgggatgtcatcccttcacatcgattgccattcctggtccccactacctcctcgatacctaccaagctttcatccatcgtggctagatccgaatcagctgagccgacttcaggagtaaagcctaccagcgacctgaccacgacggtcttgccggttgtgctcggtgctggtatccctattttgtgcgctattattatcctcattgtgctgcaccggagacatgtcaagaaacttatgcgggaagatgcaatggataaacataaatctctcgattttggaatggatacagtggggcctgccaccagcaggaaaggaatgccccagatgtcagaacccactcataccaaaggattgtctcttgatgtcggtccatatctgttgcctccgggcctggaaggttccccggattcgctacgctccttgtcaatagacgatgacaagtaccgtccggctactgcttctattcggtcgtaccccagaaactcccgattcgagggttctgatgacggcaattcaggtcttctccaaaatgcacagaggatgtctcgttcatccccgccgctgtatccccccagttccccgaacccgcgcaatgaccgcctggggcaagtccccggagtgacacgtccgcctgctgcacagcaacccggcatggccaagggaagtcccaatgccagccggattcccacgccagatcccctgccccatctggatgcctcctcgggtctagactttggactgggcgatacatacggcaattcctatagcgctccgcatgaagatcgcccgaacttcccgctgcccgattcttcgcaaccacgagcattgacccatgatcagggtcttgcaccacagcttcctcgtatttccctgccggccagtgatgttagtgactatggtgatgacaagtcgcaatacaatgttccttcggtcaacattcatggcgcagaagatgtcacgcatagtgccccaagccacgataaccaacatccagaacttccagaggaccctcctaatctggatacgccatatgatagacaccgcgatacccgccggatgactctcggtttgcgcccgttgcccccagaggacccctccgacaacccagaacagcgtgccaatcggattcgttcgttctacaaggagtacttcgatgagagcaagggtccggaggccacatactctgaggacttcgggccggagttctacgaggatggtaatcatggggctggcttcatatacgacccaaccactggcgactactacgatgccgctcatgccgctccattcgctgagccgatcacccgtcgcgcgatgacaccaccgcctcgagcacctccccgcttccaaggagccgccgctcggcaccaggccaccaactctgcgggccaaaatggcatgcccagcccacgcgccttctcgtctgcctctggccgtatgcccccacgcggtcccaagaaagcaattccccctccctcaccgctacacatccttcctactcctcacatgttgacggacgactccctcttgactgccatggaattcgcgccggccaatggaatcaaagaacgccgcgcgggtcgccctgagacccccagcggtggcttacgcccgtaccagcccggcccgcgtgcgcacaccccactggcctctgcgttcgacgagctcatcgtgatgcccagcccgcacgccctgcgcaagtccggtacgttcaccaatctggactttgtgcccccgcctcgcttcaagaacgagagtggtaccggcagcgatgccggtagtatccgcagtgctcggtctgcagtctctgctaccctccagcaaaatatccgcgcgggcacgtaccgtgtcagtcgtctgcctgcggaagccgtcggcaccaaggatgacatgatggccagtctgcgtccgaagtgggacatgaacaacgcataaggaagcggcggtaccgctttccactgtgatgactttgttgtcttggtataagagcacgtgatgatttgatttgatttttttttgttcatctgggtcccccggtgcttgagcttttgggggggtgatggagcgcccctttttatattcattactccattctcctttttttgtctggacatctactatcaatggcgtaaatagacgatggttggattctgatcaatttgaaatttctttcttcggtctggggtgtatatatgtgtatagttctagaacattaatgtgctcagatctggagtataacatacaacatacgaatccgcttcgattcgtccgagggcactgtgtccacaattatgcgtccgactacgtacaacgggaagtcgcgcgagttggcagaaatcgggccgagcgctaatccaccaagtcaggggctagatgggagagatcacagcattttatttacggggcctaatagaatcgtatttaacgggctagccacagaaaacaagattatccacgccgatcgtcttttttctttttcccttctcgtcctagtagacagaagatgtgtacaatatagttacatgtcagtatagtattgttcaacaccgttgaagaagtggagataatcagagtcagtggcaactgagtacattgtgcatcatgactcttttatacaacataccacacacgccctcagtggaagattcttccgtccccataaccttgggattcggtccttgcttcagggcttatacccacgggtacgctcatctcggttggaggtttcggtaccgaagaatcaatacgtccacggctggtagtaaatattggcaaataggtattattctgggatttctgttgtgaatattagaggcatgaaaggtgttagaggtataatagagtctcacagagtacacacagtaccacggaggattattctatagcaccagagactccatatggtcaggggctcacatggccgcatcaagggattgccagaaacagcatcgtgtttgggatgtaactgcaactcgactgtagcataaccagatttaacgatcatgctgtttctacttcgattcagcagagcacaagtatctattaatacaactaggaatgcggatacgccgcaatcgtaagaaatctaacaaatctccacttcccacttcaatctcactctcccacaccacttttctcctcccatggctgctagattcggcctcgagagactgtgagtattcgttcttctctcttttccatccttcatcttcattttcctttctcttcttttttttctattcccgtccgttcgtgagatatcgtcggttttcccctgaagactccgaccatagcctcaagtctctccttacgcgttcaaatcgcagtctctcattaaaccagtctattaactcggattcaattcgtgatccctcagtcacattcagtccgaaattctttccgcacccggaagtgtccacaatctctcaaaactcgccgaacggtctcccggctcaggatcgcttcgatctttaccaccgccaactcaatctcaccgttgattatcattgaccagtattgctattgagatggcgacttcagtatccaagggcgctgccgctgtcgctacagccatcggttctaccgccgcggacaccgctgtacagacttcggcggctgctgagacaaccagtgagacatctgccgctcaacccacgacctcttcagccgatccgacgacttcggctgtcgaaacgacaacttcgtccacggctgctcccaccacttcgactgaacccaccactagtactacgagcagtactacgagcacgactagtagcacgtccacgccggagccgactacgtcgactcccgagcctaccacgtcgaccactacgtcgaccccggatcccaccacgtcgaccacccagcctgtgactacttcgtccacttcgactacttcttccacttcttctaccacaaccgccccgaccacctccatagctcccgagacgacaacgttctcatccacacagggaactaccgtagttattatcacgtccactcaattagcgcccaccgccgataccacgtctatcacctcttccagcgcaaccgactcggccgcgctctctacctccaccgcagcagctagctccggtggtctttctcccagcggcacaatcgctgtcgcagtcgtggtcccggttgtctcggtggcattgatcatcctggccctactcttcttctggcgtaagcgtaaggcgaacaaggcggccgaggaggagcgccgcaaggaagtagaggagtacggattcaaccccaacaacccgaacaacgacccaacccttcccggtatggcaggcacggtggtgcccaaggacaacgaatcctccggctaccgcggctggggaactacttctgccgggcgcaaggcgtccaccaacctctccagtggaatgggtggcctggccatgtcggaaggcagcagcccgggctaccaccacggcgcaacacctagcgatggcactgtgcaatattccgatggaacccggcccgactctggagagatcgtcgaacctctcggtgtgctaggcgccgccccagtggctgccaacaaccggaataatggcgatatccaccgcggcccctccaacgcatcttccgcgtactccgcagccaaccgatccgacgcatcggaagaaagtcacatgtccgctgtccacccctcagctggctactacggtgagaacccgtactacggcgacatcaacacgcacggggcatacggcggggacgactaccagcctgtgatccgtgacgtccaagcacgccgcaatacccgcattgaaaacccgggcgtctatccacgacagggcaatgccggtatcgcgcagaacttctgatggctcgactgattcggatttcctatactctttgatctccaaaaagctcggcattccatttggcattccattttttgtgtgcttgttttgatttttgatttttttttaaccttgcacaataccacacgctctttctctctcacccaccgccgacttcattcgttttatcgggtctctcatgttccaattcccggcgcgatggaccttcacttcatgtcactattgtccctctacacttttattttcttttcccctctttctgtcccccttaatcggcctgtcgggctttgatttggtttggtcatttgtttgatatatcccgcgcatctggtctcagctgcatagcttgttttttcgttttctgttaacacccggttttatgtctgtgttgatttgttgttttattgtggagctgcatcttgtacatttcctgctgcgtgtggagttttccatgcacctggacatactcgagatttgcaatgataccttgggtatcctggatttagtcccagttcccttgtctgaaatgaacggtttaccatgagttctggtatagttactcggagagtgccggcagaatcgtaaaagaacagcgaataatcagctaacttttactaaatacaccctaaacagcccaaccgagtcaaatggactctaattatggctaattagagtagtcattactaaaaattatgcatataataaacgtactcggtccccttccgttgcagtggtcaccagtaggttcacaacgtgcctccgctgttcgcggtgattggcgctggatgattcacacagctctccactccccggcttaattgcacctcgcagcttttcccttctctcgcgagactcgaactatagagaatctcctaacacgttctcgtccctgggccctgtacttgtccgtcggtctgccccgctatctctctatcgccctctatctctattaccgcttctaccttagaccctctgcgctccctcaatccttagcatctaatcccagttccttcatcatatatgggcgaaaacccatcgcaacgcaacgtcacacattttatcgacttgtgtcactctcttacctgtcccactattatttccttccccactgtgataacccattaactgcccctcttgcctccgaagccgaaccagctttggttcgtgtccttgtcctcccaccctcttttacttttttttcccttccccaatcccaatcccaattgtttcctttcctttgcattctactctacctcgcatagtcaaccagctccgattcttatagctctcggctccgtttcgctgagcttgcgctacggttgcgatctcggtctccagagctcgggagagctaaagctctctccgagagtgtgcacacaacatgtacgtatgcctggcagctcctgttgccggttgaaacattcctcgagctactgctgatacgccttgattgcataggaagttcggcaagcagatccagcgcaggcagctagatcttcctgaatatgccgccagctttgttaactacaaggcgctgaagaaggttggttgaacgtcctgtctgcttgcgggaatatggatctgagcaggactaattcctatacagttgatcaagcaactcagtgctaccccgactatcccggcacagagaacagccgaggagattgctagagctaatgccgacccccaaggcgcgttgcgcgcgaataaggaggttttcttcttccgtttggtaggtttgggatactttcctgtatggatggtatgtacttactatgatgtaggaacgagagattgagaaggtcaacactttctacctccagaaagaatcagaggtatggccatttattatatatccagtgcacagtcacccccctccggaggctcatccgatcccttttagttttccctgcgcctacggacgttggtcgacaagaagcgggtcactcaatcccgggcgatctcgaattctaaagctccgtcgaatttcgcggctatgtttgaaggcttccagcaattcgatggcgacctgaataaactgcagcagttcgttgagatcaacgagacggccatgtctaaaatcctcaagaagtgggacaaaacctccaagtctcgtatgaaggagctgtatctacatcgggctgtggaagtgcaaccatgcttcaatcgggaagttcttcgagacctcgctgacagagctactaccgcgcgactggaattggaggcttgggccgagggcgagaacattcaatatgacgcatcacgtccattggaccgtaccgcacccttaggctctgaagaggatgaaatggacaaccaggtcttgcagtctgcctccgctggaaatctgcaaaacctacgtgaatggctggccaggttacagcagttgccggacgcccgtgagcgcgcaacccgtacgttcctgaccgccatcaacgggttctcggatgatgtgctcgctctgctactggagagtcaactggttgacatacacgccgaggacgacatcaacgaacgaaactgccttcacgaagccgccatctcgggccgattatttgtcttccacgccggtctccgcgcaggcgttgatttcgcccgcgccgatgtctatggtcgaatccctctccactacgcatgcatgcacggccgcgtggatatggtgcgacatcttctcgcagccggtccgcaaaccgtcgacattatggaccatgacaacttcacccctctaatccacagcattgtaaagggccagctggaatgcgccgagcaggttctgcttagcaatgcccgcgtcgacccggagcccgagtcgcctcttctgaccggaatggataatcgtcctttgaagggtccggatcatattcctttgaatctcgcctgccaacacggctctctgcctatcgcgaagatgcttcttgagcgaaatgcgcagttgctgccggatgcagagggtctctacccgcagcatatggttgcacgtgcctcacaatcgccagacctactactactgctaaaggagcacggtgctgatctcgaccagaaagacaagctttatcagtggactccgctgttccacgcagctagcgaaggctgcgtcccctgcctacgtaccctcctcgagtgcggggttgatgcccaggttgtagatgaaaagggcctctcgtctatgtactatgctgcctgggaaggacatctagagtgcatgctccttctctgggcccagccctccaagaaaaaacccgcgctgggacctcttgatattctcaatggcgtgcggatgcatgaacctggtctgggcgacccgctgtctgtgactgcgagcgtctctgaattggaaatgacagatggtatcccggaccttgaattgcctccccccattatccctctccgccgctatggtcacaacttcctcgacaagaaagtatttgtgcaacttctgttcgatcaaggaaatgtcgggtctgtcatctttgatcaggcgggccgtcatcctgccgctcgtatgaccatctcttccaagctgtcagatctcatccctcgtactatcatgctacccatccaggaagagacacgcacaatatcgttccacgtggataacctagacacctttgccgtggactttgagatcttccctaccttcggttcaaaggtgattgcaaagagtgtcgccctgccagacatcttccgcgccgagtcgtccagcactggctcatgctgtctgcctctattcgacccccggctgcgtacaatcggccagctgcgcttcaagttccaagtgatcaagccataccccggcgatcccctggagatcacccactttgctacatactggaaggccaccagtgctcttgattcagatcataatggactggtgactggttccagtttgtcgggagattacgtccagctcttcgtacaactgacccgggaccgcgtggcagtcctttacccgcaatttacaatcaaccaccatggaatcgacattgcaatctctcatttgacgtttgcccagttccagaccattggcggagagcgcggtttcaaccctagcgagatcctcgagttcttgaaagaatcagcgacggttgacatagcgcagacccatcgactcttggcgacgtcgttcttatcgttacgcgatgtcttgcgctacatccctattgacttgaatgtcaacatctccctcatttacccatccgccgcggaggagaagaagctcgacctgacttctttggcggacgtcaacagctttgccgatgctatcctgactgatgtcttcgaccacgcccgtgtggcccgtgaaaagaatcccgagttcatgcgttccgtggtattcacctcatacaacccgaacatttgcagtgctctcaactggaaacaacccaactgtgagtctcctaatacagtccaatttgtgtgatactaactctgtgactagatcccgtccttctctgcaacgatctcggtcaaatccgggacctggctgggaacgtcaactcgatgccccttgtcaacagcagtggacgagcttcgatgtcgattaaggagtctgctcgtattgcccagagcaacaacttcatgggcctgatttgcagatcaagccttctggtatgtttgtcctatttcccgcctcttttttctctgctgaccaattagaatgtcgtccccgcgctcgtcgagactatcaaggagcttggcctcgtgcttgtggccgatacctctgatgaggtcacttcgaatcgattcgaagaactacccgctcctgatactatgggcgttgccgaatgggcttaccgcatgcccgacggtgttaacggtgtgatgagaggcaacggcattctgagatttaacgatatgatcgatatgtgatccgatttacctctacgcaccttttacatacgatacgtcgaaatttaatttctcaacgaagattacgagctttagtagccgccagaattgcttttttttttcctatcttactcttggctatttatttcacagcagagatggtcccgcgcgtgcgaccttctctttattgcgttctaggcttgttcatttcctagtcatcttgggcgctggagatagggctggcgtttttatctgggtttggctttgtcgactacatgtagtgagatcgtctagagagcaagagcaagagcatttgagagttttgaaggcaaagaaagactgccgtattagagagctgaatggctaataatgtacaatggaccgaatcccaggccctagtatctcccgctatgctacttacttactgtataatcaatcacatccccttcacttcacttcacgtactcttaggctttctcttcccaatatcccatccccacctccgcagcgtcttcacaaccttgggcgtgacagccgccgtcaaaggcacgcgaatgaagataaagctcttgtgaatcgcataagcgaaaaccaactgcgtccagatacctgcgtgaacacaaaccaatcagtcagaacatcactctcatcactcaaacctcaaagccctaaaccaaaacagaaacaaacttactagcttcctcctgattccgctcctcagcctgagcaagctgtccctgcccatcctcctcctccgaccccttcgtcttcggaaacacactcttaactttatccttcacatacccaataacaacatgctcatagtacccaatacgatcaacaccaagcaaccgcacagccgcaaaacaaaatgggaaatccagcgccgacaggccaagatacacgcccagcgcagcccatccgtactcgcgcgagagagacttcagacgctgggatagtgaaggtttcggtttagttttgccgccgcctctggacccagttccatttccaggtccagagtcagatccagagctagagttcttgccatcaccagcagacccggagttgaatcggcgctgcttgggcttgggctggaatgagctcggtgtcggtgtcgggcgggtgcgcgtcgagaagcgcgctgttacttgtgctccgtgcgcgtgcgggaagatcgtgctccggcgtgcgagggatggacgaattgaggggttgaggtggagctggagatgtgaagctaagcttggggatgatttgagcatcgagctagggcgcgagatccattttgcgaggagggttgggcggacggacatggtcggatgggttttggtagccccgttggttttggtgagggtgttgtgtgattccgggagcgaattggggttgagaatggagcggtcatggaatgctggatgggagggtttttttgtgtttctcggcgttttcggcttccggtccgatcgggcttgcggctctgtatgccggagttagggattaaggcggtttggtggttgtagataggatgggatattgtagatgggtgttaggatttctatcgacttttttctttttgttaaaagaccttggtattagctaactatgtcttaacgcgtggggagattgccagcttggatttgtatacttcagggcggcgtgcatatcgctgactaagcccaacaccaaaaacttcccgagtttctcagccacgacgagcacctcaatactcaaacccctcccaatatcaaacccaccatgtcgccgcgcttaggagggctacttcagctctcgcccgtatggacgagctcattgatcacgccccggatccccatgcggtcattcggaatccgatctctcaacccgcccaagcccagtcggttcaacatcgggcccggactaccagtcctcgagtcgacgtcgacagcggctctcctccgcaaggcctattccctgcccctccgcaccggcgccatcggcatcaagaagggcatgacggccatctacgatccggagtctggaaagcgcatcccctgcactgtcctgcagctggatcgtgtggaggtgctctcccacaagacccgcgagcgacacgggtactatgcggtgcaggtcggtgccggctggaagcacccgaataacgtgaccaaggctatgctgggtcatttctcggttaatgggctctcgccgaagcgccatatctttgagttccgcgtcaaggacgaggcaggccttctccctgttgggcagagtattgaggctggttggttccaggagggccagtttgtggatgctcgctctaataccaagggtaagggctttgcgggtgtcatgaagagacatgggttccatggtcaggatcgcagtcacggtgttagtttgacgcatcgttcgatgggttcttcgggtcctggtcagggcggtggttcccgtgtttaccccggaaagaagatggctggaaacatgggaaataatcagaacactgtgcagaacttgaagattctcaaggtggattctgagaatggtatcgtggttgtcagcggtatgtgattagagatgctctgacctctcgaagtcaattttgctaacttatatttttcaggcgccgtcagtggtcctaagggctgtgttgtgagaatccaggatgccgtcaagaagccatggccggaagtgccacaggcaaagtcggctgaacctgccacggaacctgctactgcttaattggagatttttcttagttctgaccatgtactattacaccatacgcgcgatattgtttgacttgagcggcgtttgtatatgatacaaaaatgatatcctttcttttttctcttagccattgagaaaaaaccagtggcttcgccaagttgataacgcaacaaatggtcccataaagaatgaccctaaacgcccgagccaatgcactgctgtatctgtacactctctccccgatattcgccccgatcttcagttcttccggaagggatcgctatcactgtcaagcaattgaaccacctttccatcctcagtctccagactccattcctcagtacggaactagaagagaaaacaaaacaaatcagcacttatcacaaccataaaaaaaataaatcaaaaactcacatagctcatacgatccggccgaatgcttcggaacctcatcttgccctgggacttagtccccttaacccaaaacgagatattaatgcgcccatgcaattgattcatctcgccactaatccacggaatctgctgcgcaaagtagatctcgtcgccgaggatctcacgagcccgcggcgacgtccgcagcgcatacagcgtgctgttcacgatgctcgacgacgacttctggtaattgaagatgcccagcatgcccgctccagtcgtaaggatgaagatcgggagtgtatacagccacttccggccaggcttcgggttcgggagctcgcggtctgcacggcgttctagcagtgggccggcgttcgggcctggcgcggcgatcattgtgcggcggctggctggcttggggcgggcggtttgccgggcgagcgcggcgcgccgcgtgaatgctcgggagaagaacattgtggtgttttggagggtttgtttggttgttttgtcgggctggttggggttggggggtggagaggttgcggaagaaaatagtgttcaaacaagacaaacagatcgggcggtttcgacgtcactgcaccgccaacggatgagattacaacgctgctttgagatttagagaaatggctgcggtgagattgcgcaaggcgtttcggtaccctgaggaatcggagggcgaacgagaggagttggatgaagaggaacaggaacgcgtcatcgagcagctgcagagccagaatgatgctcggaatgcccagtacagtgtacatatctttctttcttctatattcgagaatccacgctgaacatgtttccaggtgatcttcactgcacttccactgctggctgcgacagtatttgtgccttcggtgctgtcagcttccagtcaggctgaacgattgttctcgctcctcggtctagtctcgttgttgacaacggcgtatatcatgaaacgctctcctctccagcctgatcgcaaaggcaagaaacctatgacattccacaccgaacgtattgctcggatccatgggactctggtacctggcaatagtgcgctttgcttgttgctggctttggtctctctttctacaggatcatcttatgcgatccgaccagtactgtacttgattcctggaggtaagtctgctctttcttcgctggggtatctactctgaccttgtacagccatgctcgtagtgattctactcgctcgaaaggtcatgctctctgttgaccttgcatccctcaaggatctacagtacgagtataaaggtgcctagccagaaattcaatccaacttgaatacatatatgttcactattagtacagccagattttttttaaaccatgttgtcgcagaagagataaacccttcggggaatcacaaataatacatccgatttccttaatcaaacaccattttgcaaatattcagtgttcatatcccacttttaatccttctgtatcatcttgcgcatgtaatctctgttgtatgctcaaatccggaaaatacagcaacgttcatggccgtttcaagtgcttacggtctcaacagagtcctggatcaccaacgatgggtcaacggggattcccccgtagtcctcataaaggaccagtagattctcatcgtcctcgttctcatcgtttccgtccccattcggtaccggctggtcgaatgggctggactcgaagctgaagccctggtcctcgagggtcttatgtcgttccagttcggcttcctcagcttccttctggcgtttttggatgcgtccatgaacatcatcaccaaatttcttcaaccaccaaagattcgatttccggaaatccaccaaggtctcgatactgcggggatcggcaaccttactagtgtcatggcccagaatggtacagttaggctcatacggtttcatcgaagggtcacgctggcaagcagcgcaactgcattctttacgacattttggacagagccagtgatgtttttccatcgcctcctgtggggagatttcaaacgcgcggaacaaactgccgtaacagtaacgctggtcacagtttgagcatggagcgagtttccagctaacttcaaaatgaagacaaacgtgacagcggccgacgtcatttgattttgccaggagagactgccgcaatttgcggcgctttttagatcgattttcgtcttcactatcagcgtcttttgtgatttttgccacggggttgggctttttagggtcattccaagggcggcgcaccagttgctcctggcagatctccgccacagactttttgcctgcctgacctcgggcgacaaggaaagtgggaaactgaaccttgaaatccttgttgttctcatcagaggaaaatatcaaccgtcgccatgtttcataacgctcggtcaagtgcttccatgtaaattgttccatccactgaaggttcgaaacacagccacagcttctacccataacgtagcaatccatgcagacatcataaggatcttcttcgccgccgagagcgtaggcacagccagaacaggtaagaaacctgttaaatatattgcaccggcagaatgagcaggtgacattgctttgaaactcgtggtactcgacattcttctctgggtttttttgtgagaatgactcagacaacaaaatattcttgtacatgctgaatagccgcttaaagtcgtcccacagttgaatcaccaccgggtggtcgatattttttgcctgccgcaacagtttggaatatcgttcgagagtgaagtaaacaatggctttattcttatattgctcatcgcggcagaccatccgcgcatgcggtaaagcttcacgcagagccagctcgagggtgtcaacgatagtgcgattccaggcaactttcattgtccgagtgccacggttccaaacctggtgtgcagcgagaggaggtacaagaataagatccccgggtttttgttccaccacccaggtcttgaatggtgcaatcttccatgcatgcaaaggagcaaagaaatcctcgatgtcaatatcgtgccctagaacagacatccagtattcggaaacaatccgccgatctttggtctctgtcatgagccatattgaagaacccggttccgttggcttgccgtattctggagacccgtcggacgcgtcgaccattatattgtgaccgagactggcacacatctcctggtgtgctggtgtgtaagtaccctcatggccaatgtagcacatcaggttctccgcacgcatgtttgggggcagactgctcatcaaatcgcccgctggggcgatgaggtcgccttggggggtcctagggatttcagccagattcgtctttcccgacgcagggccttcaaaggctttgggtgcttcgttgaggtaaaacaatgaaggaggtaacagtttctcaaggtaagcgtgccactcaggagggcagtcgatgtccttgaggtagagccgttggactactttgtctgcgtagttgtggacagttatctgccgcgtgagaagtggtaggttttcaaggtaatggcccatactgaagttctgggtcctcttttttaccagatctcgaacctcctcaactaagagaggttgcagttagaatcaaccaacgaaggttgagaagactcaagagcgtgagcttacctttcttcgcatatttttctcggagccatttttctgagaaaatctgcttatcaagatgtttatcaaatcctctgatgaccagtggttttccgctcaggacaacttggaacaggacaagcttctcaaagtctgcgagcggaaattcatcgatagagtcacaggtaatattcatcgcaaactcgaaattaggggtagattcaacaacctcacgaatgtcgagaagaggcgataggggctcgaaagccaggcgggttcgatgtgccggcatggcgagcgcaaagccccagagggggcaagatatcgacgtctagttgatgtttgtaatcggcgcgaggctcacagggaccgcttcatgatttgagggggggggggggtattggtagtcacagccgatatataggctggacaagtcttgtaatcattaaatcgttggctgaattgcgctggtctgtgttgtttctgttgtttctgttgtgcggcgtgatgatggtacgagataagagcggagtaggaaggagcagaggggcagtggttgggtatacactagctagaacagaagagtatagtatgtcaatttaagattggaagccgggaggtataaaatcagacagggtatgaaagaaagtcatgtcgttcgttccctttggttcgggtgatcaccgacttctgttggaacgcgggatgccgcgattgatggcctcaggcagagacttacacgtgaaaccttccaatgttggaagtgtcacagttatttcactattttatctatatatttccaatggaacttagctgacatagcatattatctttgcttggcttaaaggttataaaatttaacgcgttatatactcagcagtcagcatattgtgacagcgcaactccatagatctgatgccccaaataggcttaggcggagggaagccgcttctgctgcatgccgatctaatttccgacttctccagatctttgaatggccagaccttcagggcttttgggaggtatataaatattgccaattgcctgattgactcacccatgtttggtctctagatcccctaccctcgctatgctttccaccagctcccggctcttccgcgctcgactatccccatgcaggcaaaaggtcaacctcagtctgtacaatgggcgcctttccacactcgctcacaatgcccgttcttcaactcaattgaatggcagccgatctctcgctggtgcctcatctaatgccttgcaaccaacacgagtccaagcccgacacagctcccagttgcaatcgcctgcaacacaagcaatcgagacggatagtgcggagaagaacccagccactcactacaccccaccgaagacaggcctgattgcttccctgccgagttcatggataccgtatgcagaattggtgcggctggacaagcccacgggcacatactacctgttcttcccaactctcttttccacactcctcgctgcgccaatggctggtgtggcacctctccatgtcttgggcacgacggcactgttcttttccggtgcgctgatcatgcgcggtgcaggctgcgcgatcaacgacctgtgggatcgaaacctggaccctcacgtcacacgcaccaagttccgacctattgccagaggtgcactctcaccgaaaaaggcaatcctctttacaggctcacagttggtggctgggttgggcgtgcttctttcgttccctacacagtgcctgtggtatgggattcctagcttgccgatcgtggtggcctaccctcttgctaagcgcgtgaccaactacccacaagctgtgcttggtcttgccttttcatggggagctataatgggattcccagcgttgggggtagacctgcttgccaatcatgatgccttgatggctgcaggtgctctttattccagttgtatggcttggacggttttgtacgatatgatttatgcgcacatggacattaaagacgacgtcaaggctgggatcaagtcaattgccctccgccatgagcacaacaccaaggctgtcctgagtggtctggcggtgactcaggtctcactcctcgcggctgcaggagttgccgccggttgcggacctgttttcttcgtcggcagctgcggcagcgccgttgcgtcgcttggtctcatgatctggagggttcagttgaagagtgtcccgaactgctggtggtggttcaagaacggatgtctgctgaccggtggaggaatatccttgggcttgctcgccgagtacgcgacgcagtaccttggtttgtacaatacgacggagccggagcgcgtgatggccgagtcaacgcaataagcatgtaacaatatgtatatatagacatccagggcttggttccctttttcacgagttctgcaccaatcctgcgtagttttggatgacagtgacaatatctctccagtccatcatatttccggtactgacatctaggctgttctccgcgggaggcagcaaagtcacccagccttccgggtttgattcactccatccccactgatcacgtaggactttaaactgtttttcagtcactggatgtcggtacatacatctgtccatatccaaggctgcaaagatcctaggtttctggcttttgaatcccatatccactactccagtcgtgtcccaggccctaatgaccgaaagaagcaagttgtcggcgatcccattggccattttcgccatggtatttgcagacattggggcgaccagtagaatatgcgcccctattatgatgtcagttcatcgtggtatcacgtatcattcatctacatagccactgacatttgcgcagctcaatatgcagcactggtcctccgcgtgtccacgacggagaccattcatcttcgtcccggtagatagcgtccacaccatctatttgaagcagagtttcgaaagccggctgctccaagatttgtccgacgaggaacttctccgctggctcggtgactaggatacggattgagaagttcttattacgacatagcgcctctgcaatgtcaggcagcttgatagtagcggctgccagtagcacatggatcttcttgtcatttgcatactgctgggcgataaaaggcgtcggggatgttcgagaatccattgtagtagctttaattagaagggcagaaaagagagaatgactggtccatagagccctagagagctttagatgtgtgggggtcggcggaccaaccgcggattaaataatactaaacctttccccgaggcaacttgacgaacctcttctcttgtaaaccaccatcattatcaaaatgttttccagagcagttgcatcggtatgaactgttctttattctcgacatccgccattcgcatcccccagctaacatgaatctcgcaggctttccgcccggtctcgcggccaacctttttgcggcccgtccgctccgccatccgattcccctcgggccctgccattccctccgtcctccatgcacgccttctgtccaacgagacccggacggcgatcgataaggcggtctcttccgcccccgtcgtgctgtttatgaagggtacacccgagactccgcagtgtggtttctcccgcgccaccattcaaatcctgggtctgcagggtgttgatcctaagaagtttgttgctttcaacgtgctggaggatgcagagctgcgctcaggtgtgttgggattaccccgaacttcctgccggctatagattgctaatcgtgctgcatttacaggtgtcaaggaatactctgagtggcccactattccccagctatacgtcgagaaggagttcatcggtggatgtgatatcctaatgtccatgcaccaaaatggtgagcttgctaaacttttggagaccaagggcgttctggttgcggcggatgaataaataacagccgggcccgagtggaagatgtcagcctatcaatttggtagatggctgtctttgtaaaattatttgtctctaatttattttggtcctaatatcctgctggtcagatagttgttttattgatttggcaaatggaaggtaatctccaatctgtctgctccagtagaccaattgtcacaagccgccatgcaaacgacgaggtggactcttgttcaagaagtaaccccagttgatggggtttaacatcatatgtagttgatcttcattacatgattagtatttctcttaaatcgacagccagcctaatgagctgcttgagctgcttcggctgcctcttgtgctttcaccaggtcttcggcaatggctttgtccagctttgcgcgttgcctggcttcgtaagcttcacggctcttcaggatccgaccaacaatttcgccagcgttcacgtgttggaaggcatgctgctcggcttcccggaagattcccatcttcttgggagcagtgtatggatcgtatgttagcgggatgaaggtcgtgggtccatggtagacagcatcgggagtgccccacgggatggccttcagatatggttcggtaggggtaaatggtgcagagaagatgacggcattgatgtactgtggcgagggttagcaaatcgaacagacgagaggaaattaagaaagacttacgcggcattgaagaacacataggccacgttcgaagatgttcatgattgggtagttcaagcctttccagtggttgatcacatcgtcatcgtggatacctgcgacaatgtaggacggtgcatagtcctctccgtagtccttcagtctcttttcaacttgatctggctcataccagccattttttcggccctcggactcctcgagctccgtgactttgcgcaggaacgcaatgtgaccggaggaaaaaaggtcgaaccctccgtcaacataaaccaccctctgcccaggtttgggtccctttccgtcgactaatttctcgaatacaccagcttcctgaacgacgtggtccatcttcgcggtgcctgagccagtccatgtccacacctgaggcccaggctgaagaccactctcgtccgttgcgtaatccttgattctctgcaaaagatctttggcggaagcctgacgctcttcgggacttccatatccttctagtccagcaagtgtacccttcacagatttgacaaagtggttcctggtgcacaacagcatgcggccaacaagatcggttgtcgagatgcctggggtacgtttgacgacacggaagcgcccagcggctttgacgaagcggtaacagtcatttccatcactgtcggaagtaatgtcgtctccgtgtacgacgtatttgcacccgtagtgggatacccagggtaggtaggtcacatagggggcatagggaacactctgagttgcccatcgacacgcgtcaacggctgcgacactaaataacaacgacattaggaccaggaatcaacaacagtaccagcatgagaccaaaccgaccgttcttccagtgacatcactgtcgggcccttgttctcgaggatagcttcatcggagtgtattcccacgtaaagggcctttcccagctggcgagcttggagcatagcaccggcatgacctgtacaacaatccatcaattagttcacagcaatttaccaggtgttaattgccaacctaccgtggtggctgaagtcgaagcatccatcgacccaaagtcggtcctccgagattggtacatcttcctgggggtcaacaggccattgtccaggcagaggaacctgctcctcgaggggtgttgagtccattttcacaacagtactccgtaacaatttcaaaattgttccaaagtctagactgtccaggaggtggggaggggggatcgacgataaattacatacaatatagggggtacggtcacagtaatcttccgcattgcggggaactttatgtttctccgagtctcctgagtcgcaatcaccttcaaacagaacatatcaggtcttgccatactccccgaacagtctattcggtgtcgtgctctcctgggctctcgtcctctctgacagctcagcttgtccagctatagacccctcatctgcgtcgcatcgtttatttcactccgaaattgacaacaccaatgattccctctacattcgccccgagcatcacgcggcgagacacaaccaaatccggcgttggacttgaaacggcatatggcatcccacctccagttatgagcggagggggctctcttggcccgcaaagtgcaggcgcaatctatcaacacatccatgaaatggcctcgaaacggatagcgactctcgactacctgagaaaggcgtaagtagatcgcagttcagccacacctgagctgtgctaattcataccgcggtgtctatagtcatgaaggacgagtctattggtttaatactgtgcatttctcccgggctgacatcgctcgtctgccatactttgaagcccggaaactgtctcgccgcgcaatcaattatttgcttctaggcttgtcattgcccacaatactcgatgttaacaccaccccgttcgagtatgtgcgtgccctgaatgctttattgctggaattcgaagcgttccagcaagtgcatcccccagaaggcagctcctcgtcaagtcttgcaagggcccgtataccacaaatgttcaagcgggcggcgcatggaggtaccaagacccgacgcgccagctcggcaaacgagatcggactcccaatgcagtccagtgacccatcagacttgaagaacacagcagggaatcttgggtcggctgcctctgcctcggtcacctcctttccactcacagagtcttcggatcttcaccctggcgaggaatacacttatcttcttacgccatcgttgccattcgagccagacttctttgagacgtttgcaacgctgtgtgatgtcttaattgacacttatagccggctatgtgctctagtagcatctccatctgtatgtacagtggccctgggcgagatattttccaaagcagatgcccggttacgaaagattatggtggccggcgcagtgcgtgagttcgaagacgcgagccgaaacagtgtcaagagtgaaattgccggggtcagtcgggtggtgcttggtggtttattgggatagcagcaaggttttgctgctgtataattgggtctggtgtcggtggtcagttttgactggacacatgtttgggtttcttatgagacatgaatttatcgagttgaatgttatatgataatagaatttcagatctaaatttgagagcttctagcttctaataatacatatgttccgccttcttcagtacaaaaagtaggatatgaaaaacactcactcaaaataacttaatgggactttttttggaaatgcggcttcgtgaggcaaaaggtggtattcatgggcagcttgaaaagagtcgagaattgaaaaaagagacaggttaagacgaaaaactccacttggcgccacatgctcgaatatgcaaaatagacaccgaaaatatgctgtcgcttgatgttgaatgctgaggagaaaaaacaagggatatgctgttggaaagaggtcgcggaagtatgtcaaacgtatgagacattcatgattgtaggcgctgcttttcaagttcgcgctgttcgccgaagacgcggcggctcatctcgaggacggtttcaaatccttcgcggccaatctttgcattttcccggaagcgatcaacgcttgcctcctcaaccttgttcttgatcttttgccatccaccgcagagagcggtgattttagcttcttggctaaattcggtcgtggtagccgggctaagcgaggattgccggtagataacggtctcgcggacgctgaggacgttcgaccacgtcagatttgtggagcacatggtcaccttcttcgcgaccggatcgacataagagacttcgtaaacgtgagaggtattcgttccaccgagaatcgagagaacccattgtggcacagactgatcgcacgtgataagacgttcggtccgtaactaagaggcaaaagtcagtaaaaaggttcgggatatttggagagttctttgaggttgaatgactcacaataccagtcgccggatcgacggttcgagagagcgtgtctacgccaacgacgtgtgtcgacttatcattccaaggacagtacttgcgccagttcgccgttgatacttcgtcccacgagtagtcgaacgtgcatccggaagagaagaccttcatattgccgagtcgcagttcacttgaacgatgccgttgggtcgcgtgatcttggaatatggtatttgggtgtaggacagccttgacaagcgctgtgatggatagaatcggatggtagtgttaataaatccgagtagatatagtaagaatgattcaagccgagtgtgagagataggatgtgcaggagttgcagaaagtgatttaagtctaagtctaggaattggaaggcaaatatgagcaagtcaaatagaagaaaatggagaagagtggattttaacgatcgaccggtctgaggggaaaatccttcttttttccctccgggtcagggccggtcaacgcggagcgccacacgcctcgccgccaccgggtttttccggttcctgcttatctaatcagcggcgcagccgcaccgggcagatatgcagctgagatgttccagaacgtccaattaactctattcaatacatattcgtcgattcgggtctttatatcttctccttttctatacatcatggtcgaactcaggaaacgcaaggcgccagccccactgcccgtcgcagagaagaagaccaaacaagcccctaagcccaaacaagaggcagctgttcccgataatgataccgaaaaaagccctgggccaaaactccctgaggtggatgatacaatcgacatagaaactttcggtggcgagtttgagaccaatgaggctgaaaaaacaactctgaagaagctcctcgaggagagcaagaccggcgtggttttctttacttaccccaaagcctcaacacctggctgtaagtccctgtgtcatacttagtgcttctcttgagagggcagagctgtgttcatgtcgtactttgtaatcatcttactccagcagactgcttacgccgcttcatctaggtaccaagcaagcttgcttgttccgtgacaactacacccacttgacttctactggtctttctatctacggtctttcaagtgattcccccaaggccaacaccacgttcaagacaagacaaaacctaccttatccactcttgtgtgaccccaaggcttctcttattgcagccattgggctcaagaaaaaccccaagggtaccatgcgaggtgtctttgccgtggataagaagggtaaggtcttgcttcgcgaggccggtggtccagatgcgactgtggacgctgtccagaggattgttgccaactggtctagcgtggaagataccaaggcaaacggtgaagataccaaggagaaaggtgaagataccaaggaggaaggtgaagacaccaaggagaaaggtgaaggtaccaaggaggaaggtgataaagcagagtgattcaactcgagtgatgtcgtcacaatcacacaaaaagcgacactaagataccagatattgcatgtatggcaccgtctatggtggtttatttgtctcggtgtacgtgtttggcgtagattattagggctgtcaggttgtttttgaattgctgtggattccaatctattcagtctgagatactggtacagcacacatgatttcttgcaacttcccctatccactgacgatgacacctccgttggggtgcaaacattgtccggaaatatagctgctgtcctggcttgcgaggaaaacgaagcacgttgcgacctcgctaggttgtcctggtcgaccaatcggcactgcatggaattgttccatggcctcggtttgcattgtcgcaggaatcaggggcgtccagacttgtcttattagcatttgacttggaatagatataggaaggacctacttggacccgggcagacacaattgacccgaatgcctttcttcacctgctggttcgacaaggcgcgggtaaatgcgacaattgctcctttgctggaggtgtaatccaggagatccgctcggccaatgtaaggattgacggatgcgcaattgatgatggtagctccccgcttcatatgcggaagaacatacttggaaagataatagaaggggtgaatattggtgtcaaaggtggtctgccactggtctctgatggttcattagtaggatgcaacagccgaagagcagtaatatggggcaactcactcagtgacctcgctgatatcgctcagcatgttttggaacccggcattgttcaccagaatgtcaatgccacccatcttttccagggcctcgttgatgatcttttgacagttttccttcttgcgaacgtcgatagcgagagtatagcacttctgtccacattcctcgactctcctctttgtctcttgcgcatccgactcctcagctggcaggtaaacgatgaagcttgaggcaccctccattgcaaataggattgcaactgcccggccaatgccggagtcaccgccggtgatgattgctctctttccttcgagctttccagcggccttgtaggtctggtaaccgccatcctcggtaggaagatgagcagacacaggcttaggatctcccatgtcagactgcagacccggccttgtcaagtgctgaataggaatcttgtgacctatatgaaacacagtgtcaggaatcaatacttcacataaatcacacgtactcacctggcgcaaattgggacttagccccactggcctctcgctcgatatactgggcaacaggcatattggaaggtttaggcaagaatatgaacaagagtaatagataacttatgtaaatttgtgaatagagtacacatctccatgcaggaaagcaccgtttaagtaaagaaaatgatatatggccaccaataactaaagccgggcatatcaatgtcactatgatggcctgcttacaccccgtttgctccaaattttgcctatactggggcgatatataacttagatgttatgatacaaccagagcatctctgttctagaccttttctgtggcggtggtttaatcgatcatgttaaactattcgatccttcagtcgtagccacaagtttcccatcccagggacgacctgtatgtccaatcgggcaaagtgtttaatacctaaatgacacttctctatcccattcttgatattcctgagctgctatgtttgtggtcgaggttaggcaggtgcgaatgacggagacttgccgtcattcctacctaccatgcttagttggtggcgctcttcacctagggagctcgataacaacaagccctactgtttcatataggaataacatagcatatttctcctttttgttcgtcgggagaaagcaaagaaagatcatgggagaatattgagttctatacatacacctataaatgcttgagcaggtatatgagttgtttcaagcggatttagcgcaagaattgacgtcctggtatgcccttcaaatattaattggttccactataaggaagccatagtaaatcagtatggagaatggtagcaggttttctattgtagttgtcctcatgttgtagtcgaaatatactggaaatccttatcttatcaaccagcaacatgattggctcgtgggcgtccgcccggcgataattttttctattgcgctttccgcttctcgagactcttggtgttctaagaaattgcctggctcttttcacaatggcgaaagggcaacccaaatccaagtccgtgtcggctaataccgccaaaatccctgagcagatggctctttcgtccgctctgtcctctccatgggggttcctccgtcctacaaacgatttacatacagccgtcgtggattctgcaaagcacatcctggactccctcgctggttctgtcgtggatgcccagacaactcgccggcaactcaataaaaagcgcaaaaggtcagacctcgaatcggattcagtcacacagctccaattgaagaacctctacgtggagggtttcacctcgaatcaaatatgggagcaagcaacacgaattctcgagtcgactggtgacgagatcgagcgcgatatcactttgattactcaacatagcggctacatggagtcggctgactccgagcagctcgaggatatctctgaccccgagggtgcgcaaagcgacagcgacagccacgagagcatgcttgaagatctctctgagggctcaggtgccgaagacgatctcgacgaagaatctggcgaagagcaagagatcgatatgggatctgacgatgacatggaagacattgaagatatggacgatgataactcctcagttggctccgccgaaggagagcccgaagtatttgtcgaggatcgatttggattaaacgacgggttcttctctatcgacgacttcaacaagcaatccgaggctttggagagacaggatgccgcaggaggacccgagcagaccgaggacagcgacgaggaggatctcgactggcattcgaatccgttgatggctggaaattctgcgaccatcagtaaatcgaaggattcgcgcccaacagaaaaagaagacgaaagcatggatgatagtgaggaggaagggccgactttcggtaatgccgatctcaacggcgactccgattctgatgatgaagacgtcgcggacatggacgacggtgaagccgctgcctgggtaaacaccagtgatatcaaatacgccgatttcttcgcacctccaccccgcaaagcctccaacaagaaacaccgcgccctcccaaaaactcaacccgacgcaccagaggtcgatgagagcgatgtcaaacgcgctattgacgacgttcgacgggacttgtttgacgatgccgatgcgggctccgacgaagaagaggacgatattgacggatcagcggaccctagtgccccacgctcaacacatgagaagcagagagcacggatcgcagatgaaatccgccgtctggaggcggcgaacgtggccaagaaagaatggatgtatactggtgaggccagagctgtcgagcgacccatcaattctctcattgaagaagaccttgactttgaacgaatcggaaaaccggttcccgtcaataccaatgagaccaccgaggatatcgaagaactaatcaagcgccgaattctcgccatggagttcgatgaagtcgtccgccgtcggccaggcgccgagggccagcaagccggaaggaaaccccgcttcgaactggatgatacgaagccacagcaaggtctggccgagatgtatgaaactgaccatcttcgcgctaatgatcccaactttgtggatactaaggaccgcaagttgatgcgggaacatgccgagatcaccagtctttggaacgaagtcagcgctcaattggatacgctatgcaactggcactataagcctaaggttgcccaagcaagcatcaacgtcgtgaccgatgcgccaacgattatgatggaggaggcacgcccaacggctggcagtgctgccggtggccctgttggacttgcaccgcaggagatctacacacctggcgataatggccgagttaagggagaggtggttcttaagactggcgcgcctatctccaaggaggagatgacccgtgagcagaaggccaagaacagacgccagaataagcaaacccaaaagaaggccgatgctgccaaacccactcaagaaaagcctggcaaggcagccgagaagcagcagatgatttcagacctcaagaagggaggagtcaaggtcattggcaaggacggccgtatgacgaatatcgagggtggctctgtccacgagggtgccaaaaacagaggcgacaatctgaaattgtgaggagtatatttaagggccagtatgtactattcaggagtcatatttcttctacataaaatctattttctagcattgcacatatcatcattttgtgtcacttttctggtcgatacgtttggcacgtatcgtgtagagaaatatgttctctctattatagctttcagcaccaggatcatcccggactggctccatgtcgaaagcccttttcgccatcttcatgaaccgcatgtcggcgcgtctacgacgcttgtaacaaaagtaacagaccgagtcaggtcccaggaggtgctgaagcgtagtgatcaagagcgggaaagccggctcaaaatagacacagtctgccgcgatgatgacatctggtttctcgggaatctggtttgggatcggttctccccagtttagtatcgcagctgtcgcatttgggccaagattgttaagttgaatgttggacttcattagggaaaacataggctcttggtctgtgatatagatcgggtgctcgagacgacacgcacgtgccacggcgagtccgacaagtccacctccagcgccgagttccacgctattcaagattggattaggacgaaacgagcgaagaagagtgaatggaaagaatgctcccggccggttgggcacacagcaaagcaaagcagcacccacattgttttatcggatagatcggtgatatggcggctgaggaggtatttggccaggaccattcctgcgggccatagttggccgccgcagccgtctttcaggtcttcttttagtagcaatggttctttgaggagtccgtcgaaggaaatgtctgtggtcactgcggctttgggttcgcggggaggggccagggattcgctgattttgagtccgtctgggcttgagggtgggctcagttctggaagacccagaagagttggtatgggtatttctatcattgtgagaaatttgtgaattgttgactgttgatcggagaaagttttagtgggggatctgtacggagtagcttatcgcgaattagacctagaaggatcacctgattggttgagtggcgatttggctattaatttagatcgaatataagaaattgatcagaagaatggaattgtatttttttgtttttgtgtgcaggtttatatcgtctatcatatgcattgtatatgcaccggatccagccaagacaagcttatgcccgtgcgaacgtcgatctatatcatatcgatacttatgttgtatgttcttattgacatgctaggacattgagggctaagtgacttctaagatataggaattgtgtatatcaatatatgcgcatatataaacaaaggtaccatagttatgaagcttgcgtggggactcttattggaacttggcgatccatgtgggttttattaatatctcgttaaccttgaaatatggatctacatctaccttccagaggacagtattgtgatacccctcataacgttgcatccatgctttgaacctactttagtcttataaaagctaagtctagcgcatgtgtaacggcagtatgaagtaaaattggacacatcgatgtcatatttgtgtaaatttacatgcattaactagttaagcgcaagcttgacaagtacatatgatcacagccactttgttacatggtctgtgatctcacaatctcgtatcatttactcgaacgggtgagtacgtgttccccaccaggtgaggaacaaactgagtccaacagtctcgaacaccctcgagaccgcaccgacagcgactgtatcaaggggtcgcttctcagagaagagctggctcacaatctgtatatatatgtcagatgaattgcttggggtttcaaggcaggatgaattgaaaacgtacgcctggagcggagcttgcgaagaaaataagggagccaaggtacgcagcacccttgtagctcagtgtgccggtggcattgatcagtgcagccacaccgtaggtctgcacagcacttccaacgagggagcttccccaggctgcagctgcgccggcagcttccttggacttgatgaattcctccttagagttggcggcttgagcgcggtggtaggtgtcaccgaagacgggggctaggatgcccagggaggcagtgtgggtgaagattgtacccagcgcaatggcggagggcttcacgggagggagatctatattgtaagttgttagtttccaagtacagtcttgggcatgatgaggttatcaactcacagtgcagggtagtcatcttgaagttattatgagtggttgatgtagagtgacaagtgaattagaagagttaaagtactttaagtactgagagagggcgtttctgcaaccagggtttggaggtgacgtcgtcatgattcaacgcaactgtaggatgccgagggccaatgacgtcaactcgcatacggggttagctatgtataaccaagatttcgctagaggaaatcaagggtgatggatcataagttcagatgagctaccttgtggggaaagtaattaattcgttctatggctgtaggcgaatccttggacgtcgttgcggagtgttggggtgcatcattatagatcgccatctagatgaaatccctcaattaacttgacttgcataggcagaagaacttggaatttgaaaccagcttaaatcggctagtactacataggtagtaaatatcgtcaatgctgggctcctgtatgatttatccaccttcgaggtaccatcgccaggtccggacatgcatgtagatcaaggggcgattggcaagctggcaagctcgcaatacatgaacatattgcacaataccctatatctagatatcacgatcgttcgactcaattccaatttcatctttcttttcaattcatctaatcccaagactcgattgcgttatcgggggatctttcaagccgagcggggacaaaaagctgggtctagtccggctacagccaccctcttctacgacctaacagtcctgcggagccttcgggtgtatgaaccaccagtgcccattgtcaataacacaaaaagtgggcacttcgggtatttatttatagctattacttgcggaacttgcaatggccgctagaaactcatgaaaacgaaaacaaaaatgacatgtatttgcttgcagaatgtgctggctaatcaaacaaagacccgacaggaatatctgtagtaaaagattagactggagcgatagaatggataattggaaatgcatacttgtcagggtagccgttctctgtaccaagctcatacttagattgtgaagccttcgcagcagtgttgatattgcaagggctgggcggcaagccgttggcacccaacacaccctgaatgctcttcttatcttgcgcaaagagagccgcgaggccaccttcttcgccctgctccttaacagcaaccaattgctgctctccagcctctccgatcttgagaacgtcgtccttgggagcggccttgcttccaactgtgagcagaccaactgcatcggcctggcgcacagtgctcagttgagggtagctcctccgagcgtcccgcttccagtaggggttgtcggcaatatcgcccgcgggtatagtgactgggtcatcgtaggcaagagggggcaaagatcccggggtgggattacggaattgagcgttcagggggataccggtggaacgttcggggtcgacagcgagaaggcgacgaatgcgctcccagacgccgacggactggactgtgtatttctagagcgcaaagaggatcagcacctagcgcacgaccgtataggttggtctcctaatttctgtcgatatgaccgacctgcttgatagagatggcattgtttgtcgccttggcggcattcacgaaaccgcgagtcatggtgaaaagactctgccctatgatttaatatcagcccattgacacgctaacgccacgaggttgtaagagccggaatttgttctatgcccccgagtcatttgacttactgactgaaatccctgaaatccgtcaagagtccgtagcaagcctctagattgagccggtgcgtgaaggtaagtccggaggaggtacgatcaccggcacggattattttattaccgaaccaccacaaattcttgtattagtaattgaccgacgctgcaactttctatgatcaacgaaagctgagtctagttatgtcttgcactgagaaaaaatcagattatagagatatggttgaaatatcgagatatatacttggctaggcatctcggtaaccagaattatttgctatggaattcctcccaacaatgtgttttcaaacatatcgctatcccacactctctacaaccagacctccctcgtggagcttgttcaccccttttgcctttttctctcttaaactgacaacaaacacaaggaattttcttgtctaggacacttcgccggtgaattctgacctcaatttgctggtttggtagaggtcggactcgtggtgtttgtggcaattcggctgcaaattgaaagagtttttgatatagcccgtagcgaaactctgtttggctcttcttcttagcctgtcgctgctgcttatagacattttgaatgcgatgagcattaacaattgctgcatcaagaaagaaaaaaagtagtaggaacgacgtcttctcaggaatctcatccgcaggtggttgcagagcaggtggttgcacatcagatcagatgactgcacataatatatttgtggaaaacgtggtggcggaggtggtagaaaagcaagtggcatcttgacagtatgcttcgtacggccaaaacagcgaacctcagtctcatcatcaatagagatattgaaccctggctggtagtactgctgggcagctttctcgaatgaagaagctagaggttctagtttataccaccaacgtttatcctgtggttgagcctgctgctgaccatttggccgagagatatgtataaaacgcttgatctgctcaaagcgcttcagcatcatataaagatgaggaagatgcactggccctttctgaatatcccgccaccagtagtggtaaacacgtggagattggtgaagactcatatatactagagtaccaaagaagaccttgatatctgctatagtagtatccgtccaggccctggcagggctagattcggttcctcctgcttgtcttcgctgagtatattcattggttgactagctaatgaattcgaagatatcgtcgctaacaaatagagagaaaagcgcggatgggctatcgatatcgagcccactaggtagctggagctgtggaggacaagaagacgggaataatagctgtggtgattccacaatatgttcgtcaagcttgcgcttggtacccttgggaggcatagcgggcaggcaggcaagtacgttagtaggtattgttatagaaacgcgctcaaacaggccatgatatccaatcataaattaggctaatacactaatcaaactgcgctaaaggtctttcccaaaagacagacgaggggttacatgggttcatgctaaatgccattcatcctatctatccatggaccaggctttttgcctacggagcgggttctccttaatgtaacgcaaagtaaaatacaacatacactcctgcaacaactagctagatcaaaaaaatagtcgtgcccgggatcgaaccgggaatcttctcggtgtgagcgagacgccatgaccattaggccacacgacttgagacgataattgaaagttatctttaccatnnnnnnnnnnnnnnnnnnnnnnnnnnnnnnnnnnnnnnnnnnnnnnnnnnnnnnnnnnnnnnnnnnnnnnnnnnnnnnnnnnnnnnnnnnnnnnnnnnnnnnnnnnnnnnnnnnnnnnnnnnnnnnnnnnnnnnnnnnnnnnnnnnnnnnnnnnnnnnnnnnnnnnnnnnnnnnnnnnnnnnnnnnnnnnnnnnnnnnnnnnnnnnnnnnnnnnnnnnnnnnnnnnnnnnnnnnnnnnnnnnnnnnnnnnnnnnnnnnnnnnnnnnnnnnnnnnnnnnnnnnnnnnnnnnnnnnnnnnnnnnnnnnnnnnnnnnnnnnnnnnnnnnnnnnnnnatggtaaagataactttcaattatcgtctcaagtcgtgtggcctaatggtcatggcgtctcgctcacaccgagaagattcccggttcgatcccgggcacgactatttttttgtctttgtgtatgaataatattttgtcttgattcattatatcttcgtactaattggtgcctatcgccctggaagtgtaagcctttctatatcttgcgagcttatatcttccatagtttgtattctatttcaaatacaacataaagtgcataatttattagagttgatctatgggagtaataactacggagtatacaaactgcgacagtaacttgggttctaataaggaaaagcagactgcccgcggctttagcaccaagaataggtagaaaatcttcaccacaagcaggccgatcaccaacacgcttgagataagccagaatgttcttttctggatcgtcggatttgggggttcccgggtcctttgggtcgacagtcccagtaatgggagacgaagggtttactcttgtaccgttggtggagcatgagagtatacattgtcaacatggaggaagtaactattgactagattattaacagattaacagattacatggttaactaggtagttgttaccgagtgcatgaaatgttcaaatgtacagatttcaaagctgtaaggtgagctctaatatagcgaaataaagctacgcttaggttgtatcgcgagtcgacatatgcggagtgtgtggttgaagaagcggaggaaagacggcgtgtgacctggttcaatatctatcattccaggataaactgcgacccagcggaaaaagtagacatccgcgtcttgagaatattacaggcctccagccttcaagtgctctagcacggcatccttaggcaaatatactccgtaatcgtatgtaacattgccacaaagcgccggcctctaggactcctaccgaggcccggggtggcttggctataactactgctgcaagtgactttataactaatgtattattgtataacctcagcggtactccataactataaaacccgattatggtcatctacaattcttgtcgctatggcgaaatatagactttcttatcgtctcaagtcgtgtggcctaatggtcatggcgtctcgctcacaccgagaagattcccggttcgatcccgggcacgactatttttttgtctttgtgtatgaataatattttgtcttgattcattatatcttcgtactaattggtgcctatcgccctggaagtgtaagcctttctatatcttgcgagcttatatcttccatagtttgtattctatttcaaatacaacataaagtgcataatttattagagttgatctatgggagtaataactacggagtatacaaactgcgacagtaacttgggttctaataaggaaaagcagactgcccgcggctttagcaccaagaataggtagaaattttgtctttatatgtgaacaatatgtagtcaattagtatagcctaattagtagttagtatctactacagactgcaagacttcctcgctctctacagaaaggagtatcttggagatatttacttttgcccgccgccagataatgcgcctagcggatgcccttgcgatatcggaaaggctcgcaatgagggaaattaactcatggaaaataattccgattctcaaatagaagagacaaaggatatttcaagccagtcaaatgttattttctagcaatgtataactataaaaagcttaaaccagcgtccagtaaaccattttcggcagccgatttgccgtcaaaccagtgctgtgtaaattttcttccatctaggcatgttttgattctcaatggccatcatagccacatattcggcctcttcgcggtcaatctcagccttgcctgtccagatatcggcattatgaggcttgacaaactcagtcctcttccaaatcttccacccagcaaatgccatgacatagagggggattccgatatatgaagtgataaaggtcttgtagtcgaaattgccgtatttttccgggttgtggataaacacaccgaagctgcgagtgaaggccaccaagactgagaaaaagagcgcaatgcaggaaccggtgattcccaggggagctttgtaggccagtgttgcctcgtcgacgccctgtgcacgtcgggcgcgaatgaagaagatgtgggtgatcaagagggagatccatgtcaacactgtgagagtaggtcagaataccggacacatttcgagccattttgggagggaacatacatccgaagattgacaccatgtcagtgaagtatccgaatacctccttggagccattggaaacactcataaaggcgagcaagcagaaagaagccgacagccccagggcatagactgggacaccagcttggttagtgcgagcgaagattcgaggggccttcctctcacgggcaagaccgtatagagtccgagtcgcaatgtacagatcagagttggcggcagaaaacacaaacactaagatacagccgttgatgatgtgaggaagagcggcgacttgcttcatcgccaccacgaaaggtgaggcggcagcagagctcttggccttggtagcgaagaccaggtctggagagttgtacgggaccagcataccgaggaagagcacgctgagaatatagaacacgataattcgccagaaggtgagcttgatagctttggggatggtcttccgggggttctgagcctctccgacagttacaccaatgagttcggtacctagcaaaaaggaaaattagaatgcgaaaggcggaaagttcaatcacagaatgtccataccgaggaatgcaaaggtggcctgcaccagtgtcgaccaaaaagcgaggaattttccaagggaaccctcggtatatttagtagcgaaggcaccgggttcgttccagtatcggaagcctctcctatcgtggtcgggaccaccaccaagtgcgaagatgaaattgcacaaaatgattcccaggatgacaatcaccttgaacgatgagagccaaaactccatctcaccgaaaatcttcacgccgaagcagttgatcaatatgattgccaccatgaagatggcaatccaaacacccgggttgacattctctgctgacgtcctcggccaataggtaatgactagagcagcggcggtaagttgcgtgggtggtaggataatatatttgaggtagtagctaggagatggttagacatccggtttatactagcatgtagcttgggggttttactcaccaccatccgagagtgaatccgagagcagggtcacagaaacggccagcgtaaccagtgaaaccggaggacaatggtagccaagcagccatttcacccagtccacacatgaccgtccagacaacgaagcccataaagcagtatgcaataagcaaagatccaggctggttaggaatggttagtcaacggcaaaagatgaagcaagtgaatataacatactccggcgctataggcttcagtcagtagtgtttcataaacaactgtatccaaagagaactcacgttaaagcgctgccagtaccaacaaccaatccagtaccaatggcgccaccgatggcaatcatggaaatgtgacgagccttgagctctctgtgaagcttgactggctcatcctgttcaccttctttgaaatcccccgagttgtcaaagtactcaggctgcgcctcgatagtgttaatctcatcggggtgacccatcttgctgtaggccgaactgagaatcacaacacagagatgaagagaattgaccagactccaggagtagttgcggggggtgcgcggggactaaatgggtccaacgcacagtctttaagcgatctgctatctttcgcctcttcgagtaaagactaatattggagatttagtgactaggacatagttagttagctgtggggtgccaggtccacgagccagtatttcactcacgtaactttttggtcagagtggaggcataagcagtcagaatgcgatatatacttcgggggcctttgcgtccttgcgtcccccaagtgatcttattggtgtcttattttctccaagttatcccccgcaatacgtttttcccacagaatcaaatgcatgatcgcaaggaatattgtcccctattgatatttctggatgtgtcccctgtgttcctggatccgcttaaaaagccctatacgaaccttctaaggttggaaggggcggtccggccaaatgcgccaacactgtcggcggtgcgcttggcatccttggcggacttggcacggttacactcgggctccctactaaatgacagatctatagttacggagtagttactccatatactggtccacactgaatcctttatcagtggtcccctcttccctgtgggtatttgcctagaaccttggaagataaaaggtgtattacatattgtaagcaatctgattgtataacaaattctcagtaggtttcagtaaacttccccacaagtatttactaatggatattacaaaccttgaaaagcgtttctgatcatgataaacaggccaagccaggatgacacagcggtctcggtcaagtattcccaagaaaggatggagttggtctgaggttttgatttctacagcactacggagacgactagctttttgaatgggtagatgaatatcatttgagcaaatagcgggaatttccaatatgtattatgtagcaagtacacacctgatcggttctacctaagagcttctctgtctgagctcaattttcatctttttttgctctcggtgaacaaacactgggtcaaaaaaataccgcaaagtccttatctctctattcttcttggtatggagtacagtttatgtctcatgaaatgcacggacggcagatcagctcattcgggccttggctagaaggctagatggaactttctaaaaaaataacgtttatcttcgcggaacctcaagcgaaatccggaggcctttcgataagacttgcgtctcgttagggctgctatcagaatcaagctttgcatttgagtaactgcagaattctcctattatcaaactttatagttaaaattttaaccaacttcctaatttggaagtctggtcttgggaaccttggcaggtcagatctttcagtctcggcttgaagccggcacctacttaggaagtgagattcaatcctcttgaaaagtcatatttaacgcgttgtaaagatatactatgttggaaatgttgccaggctagaagcctgttaactaggtacaaatacgattccctcttcttttctgtcctcctctccgtcagttttctctctctgtttgtcgcttgtattgcattcccttggggcaccgagacagttaaattctgattactttgcgggataatgtcaaaatcatgacctgtgctacatccatactgtggagcgtggtatatttgtgtgcacatatatatatctctaccatcgcattttacttgacctgcagcagtcgacttatttccagttaccggattttattgttcttattcgtaattcctccattacaaatccatacttcattgctataagctcatctaataccggattcagatcggcttcacaacaagaatagtcgaccgctcatacagcctctatccttgacaatgtattaagatgattatatccaagaaaatcccgatgtgtttttggatgtccttatagatatttttatgtgtatataaacgccgcaaaaaccatgacctgtgcaggactttcctacatgtcaccagggatgaccaaacgctctataaattcctttagacggaagagtaatttttttttttcatcacaggccaatgtcataagaagcaaaggcgaggtttcattggtagaataaaggctagtcttggatacctcaccaaggtcttgcttgatgtcttctcctggtacaagatgagccacaaagttgaaggtgtctgtaaccttctaccctggaaagaacaacgtgattggttgtacttcaatggaaggtgcaaccgagggacagatcaggaaagtaggaaggtgcatattcaaggaaggtacgcgttgtctcagcgcagagaaggaaagaaaggagaagctaggcgagaaccccagtcgtgacgaactaggaagtgacgacggagcggtgcccagatggaaaggaaacgttccttctatactgggtaagcgagacaagcgagtaatgtcctcatttgcatggtttgttcagaaagcccacaaacccatgcgactggggtataaaagggtaccctcccccctgactcccttctcttcttcttcttcttctcctcttcccatccctctgaccaccatctctccgtagcccccatgagacagcgtcggcagagggacccgtagcacctgctgcccaacctaccacagggacatcaactttaccatgttgtggaagtccgtgtaggtcagcaacaaacatcaaacctggctttctcgtggatgttcctgaagtcgtggctctcattgccacttgacgagtcccacggaatacatggggggtgtaaatctccgtagccgacgactcgtaggtttgtatgcactctcgagctgtttgtaattaatctcagcattgtgcgcgcctctagttcctagttcccgttaatctttcaacattactgaacaccaagggtgttcattaatatgtaggtagtcaccttgtgctgtcatcggtgctcggcgggaccctgagctgcacccaatcgggaaactcgcgaccgcctaaagtccaatacatagagcgacacatgtaagtttattaaagccagtatatgagacttcatttaaattcttttgaatggatattctgacagacaaggaaaaagggggaacagaccaatcaaagtgagagtaaaaacaaaatatcaaactttaaagcctggtattgatatacaaagtaaaaagacacataaaaactccacggcggtcaggttgagtcacttaagtttaccatgcactatgaccgaagaggcaaaaaacagtccaccatatcattagttttaagagactaacggcggtaccacatgcgtgtgattctggtgtgtcgcatcttcttttgcagctggaagataccgtacatcaatgcctcagaagtgggtgggccttgggttttgttagtcaagttcaacagcacaagggcaaggcaagaggaaatgcttacatccaggcacgtagatatcgaccggcacaacccggtcacagcctcgaacgaccgagtaactgtagtggtagtagccaccaccgttggcacaactgcccatgctgataacccaccgggggtcgggcatttgatcataaacctggcggagagcaggggccatcttgttcgtcaatgtaccggcgacaatcataacatcggactgacgcggagaagcacggaaaatgattccaagacgatcttgatcgtaacggggggtagaaaggtgcatcatctccacggcgcagcatgcaagaccgaaggtcataggccacaaagagctttgacgagcccaattggtaatctgatcgagggtggtcctgggtgatatagggtcagcgaaggttccaaggcgcatccaatatcaaagccatagagggcaaacgaacaaggcatattgcatagcaccctcctttttctcctggctaggcaaaggcacctctcggcgagtcttgccggacgcggtcaattgctgggcgcctgctgatggttgacgctcgagcgctgtcgctgatttgattgacgaagtcgagagggccgccaagggttgggcacgcgggagagaggcaacgaaacggggtcgcgcagctgttttctgttagtgaattgacattgtcgatgaggtgaagaaggtcctaccgcacagagcgccagagatggcgggcttcgccatcggaagcatcttgagaaaagtctcttcggtggagatgaacagctagaatgaaaggtcgtgatccgggatttgaagagattagatggttgcagcgtcggccagtgacgacaagcaatatcgaattacaagagggcagaggtggcgggccgggtaactgcaagacaaggagaaccccaaaaaggttccgattccacagtggaagaacatgatgtataccagcggttcgagagagatgacgtaagctatcacctcgcagatcattggcccatcggctgtatttttcagtcacggaacctggtatggtaaaagcggtgagctgctcgtaaatccaattgcctgtctggtcattggctctgagctcattttgctgcctgggtgcctgaacccgtcttccccatacaacgtacgtgggggattggagacaaccactccactactgtctacactttgactacaaagtaaccgccccttaaaagggctgctcaattcgagagcattgtggacatgatatggagagctaatacctcccaaattagaactctcacctgatcacagtgccaagacaagggaatcagtccctagttaaaccacaagagcccaagtgattgcgcagtccccatatattgccacgtcaagggctatcgcagaaatggcgggtcccaaaattgcctgcattggcgtgatcgggaaggcagtacgtatcactctactaacttgctcgtctggaactgtccgtactgactcgattgcaggataaccctcttcacatttccctgtttcccccgtattcggattccactatcgaattctccttcttactgaactcctgcctcgacatcttcgacatccgctgcaaacaaacatccattgatcaggatctaggtctactacatgcaattgacgaacgacttgcggcctatggatggttgacgaccacgggagtaaaactattgatcattgtggattttttcggtcaggaagaggccagcgctggaaaacaagcaggcgctgcgattaatggcctgagagattctgatgtcaagccggtgtgttatccctctgtgcctggcgagtgcttcaccccctaattatttcatacaggcattccgcgcattacagagcgcatacattcagcttttgcagaatccattctattcccccgacgaccacgtcccgattgccgggaatacagcttcttctttgtctgcttgccagccaatctctaacaaaaagttcgttgcggatgttaaacgtattggggaatcgtgggctccaggtacttctctgtaggaagagaacgaatgtcggatttgaggatacagataagactctggtcaaccaggcttcccaacttacattggtacaaacagcaacaatttcaccaggctgttcggataagagccatatcatttctttgtgattaagctacttttgacttccagtccgtatggcatataattcatgaaattctggatataatagaacaggcagtaaaaataggatcctttttgtcatcatgctgattcgcgttggtagtcttcattttcggcttcggcttcagtctgctccagggcaaccatgatctctgccatttcacgaggatcggaaatagcccatactccaccacctttggtgtcaactctcccgacctctttgccaaccaaattcctgccaacctttcctggtccaattccgatccaccgcttcactcctcgttcctgatgaagatagcgaatgctatcccaccacctgactgtgtccgtgcactgtcttgagaggaggtctttaatgtctgccttagactggaagggcaaggcagtaacatttgatatgcatggaattggtgccggaaatgtgatgttgatcttctcgacagcttctctcatataatctgcagctagcgccataaccgggctatggaacgggcagttactcttcaatctgacagcccgcgggtcgtaacctccaaattgacgcatttgcacgagaaggattctgattcgttcaatactaccacttagtacgatttgattttttgagttgatgtttgcgacgaccacttgttgaatcgatgagacgcgattatcgccgtcgatttcaatacccggtgattgggagccaacaaattgctgaaccgtgcgaagcagaccttccaggtgctcgggatgacagagaagtgcaaccatgccatatgtttcaccggattgctcggttaaatggcgtgtacactcggccatcatttccgcacgatggcgaactaatcgtaaagagtctccgaattcaagatagcctccggcaaccaatgcagagaactccccgaggctatgtccaagcgtcacaccgacccgagatttagtatcgaatccaaactcctgctccagaatacgaagtatcatgactgagattgccatgactgcaggctgtgaattttccgttcggttgagctcggagttcgggccatcggatataatgctggacagtttgaacccgagggtgctatccatttcgtccagaaccttcgacgcggtgtgagggaagtgttcaacccaggtgttggccatgccaacccgttggactccatgccctattgcgctttgtattagcggtcgtttgagactcaggggcaaaggggtgggggcgatactaacctgggaaaaagagggctgtgtgcaggtctcgtctggagggtaggatagtaaggtttgttgttctggaatttgtaggcgaaacttgcgatacgacatgcgcaataaatcttagttggaggtgacctctgcgatgcgacaagcgtgagagcatcttctctatagttgcaaccctaagcaaccctgtggggccttgatcttaaccgtatcaacacaacgcatacgcattgtggctatttcgtagtcgcgagggtgagatccgctatcccatggagcgagggagtgttgttcttgagtccatcctggtgtttacgaagggagcagtgagctccgtgtggggtgatatgtgggattcacgtgagccttttcggggtagtcggctacggaattaatattccacatccaaccggcaagtgttatgcatatgtctctaccggtagacctacaatggagcttacggagttctcacatataccgattctgtgcgtattctgagagcaaccaataatataaactgtttagctacgttctttagcttcatagaatatagctaaatacctaattgagattggtgcaaagtatgtatgctatggtattcgctctatacagagccccacatttcaatgagcagaatgggctggaataatgtgaaatgttattctagagtcaatttaaatggctattcgcatattatatacatctagaatatgttaccattctgaatgcatatagatccatgatatatagtgtatttaatagtacatgtaacttacactcatgtaccgacctgtacaatatggttattgtctcaccgctttcggacaaacatcctcgattgttattgaccaaccctatcactgctatcaccttgctccaatttaaacccatcctcttgggagagctttcttctcgctctatctctctcgttctctcaattacgaccttaaattaacaccgcagagtgaatcggacccccaagggtcaacaatcttcgaagctttcgtaggctagcgtgtgttcgcgacaggttgcgtacattgaaaatgttcgtcccaaaagccggtggtcgcaatactcgtcgacgccagcgaacaagctcagatgactctgtcaaaccaccaaaggccaagaggcagcgctctgtcctgcgacgcccagatgaatccccttccgataccaatctgggacgtgagatcgcaaaattagcaacacccactgcgccaaacgatgacattacccctacggatctgatgaacgatttgcatatatcagcccgtggtgcgaaacaaggcgatgggtctgggaataataacgaggggacaatcgttctggtgggtctttcacatctttgcgcgttccttcagaccctcaagtccaaagtgctaacttgctggattcaaagtcaagcacagatttctatactgtcgatcaactgccgtctttaccagatcaaattcgtggcttacaatcaggtatctcaaattctatagctttcctcaccttgggttgcgctttgttgacactcaccctttgaacgcagaacccctcaagtgctttttcggaactggtcataactacgcattggctttgacccgctcgcatgccatcgtgtggccctactctgcgcccgcttcttccccgtccccgtcggagacgttcacggtatcgattccggagtcttgcagagatcccaaaggtgccgtcccactcggagttctattatccacggccacgggagatcacccaggtctactagtgatcatcccttctacaggaaaagtcatttactgggagactgtatccagtgccgcgtcattgggtttatcccggcaaaagcagaatggcatccaaggatccacccctggcatgctttccggtgagtatgccacggaaatactcaacggggagccttcgggagtgatcgtcacgttctcgtccggacgagtagcacacatcaccttgagggacccccagggaaagccttcagtggtcgtgaatttcctcagaagcaccgcaggaagtggaggcggtggaattttcgggggcctcaaaaacgtattcgcaggcgggtcatggagaaaagaggttactgcggtccgggccggtggttctcatcaacgcggccagcgagatatcattattgcaacttcgaccggattggttgagatatgggacacgcattggaaccatgggaacaccctcaaaaaaagatacgatctcaagaacgaaattatggacgccctccctgaatatcatgcacagccgacaaacgatacagagctcaaagtcatggactttgtgttctctgccctgcagtctttcgacgatgctgtccaacttcccgatgggtcctggcgcctctttctggttgtcaggtcgccacaatggttggaaactaggacgctattcgtggttcaagttcacctatcaggaaacgaatctcgtgttatgtcaacacatgccgtggatgttcgccatattcctgtctcccaacttgaagcttcgaaacccaggctatttgtgccgaagccagaagaaacggcttttatcctcattggccagtcccttgttattttgtctttaacaagtgttgaagagactccatcctcacaactgcttctcgattccaacaacctgcctctgcctttccaagataccatccacttccgctccggcacagaacacgaaatcctggggtccatctcagaggaccaatcgaacgatttgccttgcgcagcatgtgtgcttatgcttcggaatttcggtgtaattcgtgtgacggttctccctcgtcctagcacagaacaagatgtcgaagagcctcaggtcacagcaaagcacaagcttgagcaggcggtcttctttgggaccatggcaaaaaatcctttgaatttatccagcgagggagacttgaacttccctccatcagaaatggagcaagcatctttggaaatctgcagggagctcctccaatcagaaactcgcttcattcctaccactgctatttcactagagcaaaatctccgcttgagagcaaaggcactagatgatctcgcctcattactatcacgccaagggaatcctttgagtcggccggcaaagtgggagttgctgtgggctgctgaaaaaattgcagcacaacgagctatgtggaagattcaagaggcctgcaagacaaaaaatggagacgaagaaactttcctcggtcatgtcattggatctatgcacgaaaaattcaagactccaatcaacgcccaacacggagagactgatccggtgcgtcaatggttcctgagagattcttatcgcatggagcatatcatcccatggatcaagaacgcaatcaagtccggtcggggcaatacctccaaccctgcgcgcgcattgtcagagaagatcctggcggcgagtgagctttttctggcggtcaccgaaactgctttcagatatcgcgatgagcacgttgcactttatggtcttcatggagacttcctggaggatggtgtgctttctgatggatatgaagatctccccgagttctggacatcaagagctgttggttactctgaagcagggcatctactcgatttagaactggatagttgccggtcatggataacacccgcatcggctgctgatacccctgacacacatgttttgaatcaagttgcgagaaacagctatcgacaccttcgcgtgatcggtcaaatgcatctcgagcggactcgatggctctctgcgcaaggagatcccaagctaatggatgaaagtgtctcgattgagcaggcccacgtcgaagaccgcaaatggcaactcttcaagctggctggtatcggccatctcgccgatgccatcgaattagcagaaagcttccgagacatgggagcattggtcgagttaatcatcgagctccaggaccaaaaagcaactcaaaatccgcgcgcagagccaccaattgacgtttccacgactcaaactgagatcgatgcggatcaattgatcgccaagtatttcgacaagtttggtgacctatgggcggatgcatacttctcccggcaaattgctatgggttatccaggaacgctgtttacgatgcggaaataccaatccgccgtcactcgattccttcgaagtaaccccgcatattctcgcctgagctggattaacgatgtcattggtgaaaacgattatgacactgccgcagtctcattggagaatctagcgattggcagtgaaaaggacttgtggagccaccgtgtagagatctcgatagccaagctaggcaaactagcgacgcaggagcaaatggattcacccgttgtggcttctactttgcaagaggatttgaagcgtcttgaggattacgttgaggtcgatggaattcaagacattctctatcagtatgttgagcctgtactgcaaggtgccattgacgaaaaggcagaacttgaactagctctcggtcagtatggagaacatatcttcgaagatcggccatcgctccatgaaatcttaagcgacgctctctctaccttgatcgacaggcaggttgtcggtgccgatggcctgattgatatcttgacgttgatgggccctactcagctcgcagatgacagcgagagcgagattgtacgaagcgagttccatctcgcattgcaggttcttgattacggacgctatggccagcgagatcccgcctatctcatggctctacagaggttgatctggcgacggtgcttgatcaaagatgattgggtagctcggggcaaagctgccgaggggcccaatggcgatgcacacaactcggtcgccgacacggcgctctaccgatcacttactgcatgcttggaaggtgagtttgttccgaatataagcacttggactatcgagctaactaacgtactatatttagaacctcgaaatgctggtccacactctgtttacacagctctctcgcccgcggaggctctgatgaccgattccgattccgatattcttgtgtcacggttccgcccagagcaaaaagctcgtgtggcagccgatcttcagaccgagaatgatattttgcgccagtgcattgatgtcggaaaacttgatttctggttccaaaacctccgggaaactgccgaggtccatatatctcctcccaaatagaccgcctatgattgacggtgaaattgctggagcaaatgattgaattttctatacaattgacacgggtggcggatgaaatggcggcgttttcaatattatcactcggttatccggtggccgatgggtcataatatgttgtatgtatgaaatctcaagagatatttcaattgttcaagcttcagtaagaaaggccctaaagctacgttgtacttgatgaccctcatttttagtgaaatatgaaagtcatgtttgatttagtttgttttctcagactcccatgcaatagatactggttcggggaaccaccgagtcatggagtcacgatatgatccctagaatttaccttgttcacgttcgacttactcgccatccaaatatcggaagctcaagtcgtcacagcgccagccgagactctttaatacttcctgccctcacgatcagcctcgctatcgttgctgctgacagtatcgaccttggtcacgggattatcattcccggcagccacatcagcttcaccaaggatctcttcctcgaacaccggctctgggtcaatagcctcgaacttagtgttgaagtcggccagaccttgggtgctgctgttggagcgacgcctggcattggcgaacgagtagtcagtgtcttgcatttcgtcgcccgatcggcccctgtagcgagagaaatagcattagctagctgcacacgctttattctgacgtgcaggaattaccaattgcctttgccgcccccgtccttctttgtcttgcgcggatcagcgtcagttgggccggacttggcgaagtagcgtgggatgttttcacggggtcccgtcgcgctttcgacttggtgttcgcgatcgttcattttgtgggaacgagtcactaggagttgagtcgttgggtcagtggaatgttcactggggaattgagatggcaagtatataggtatggtttgatgccaaggtatagaagtatatctttcacggtagaagcttactgttgtcgatggtatttgatgtgatggtagatgaggaattgtgttcaaggagagatgggaaatgaggaaaacaagaaacatgagagcaccagatatcatgcaatccgagaggggggcgtaggactcgtgacctcatacccctagagagtgcgggggttggactaatgggggctccaccaaccttatttcgtctaaacatcgtcgagatatacaaacagtcttgatgaaaggaaaacaggcatgtatttcttgttctttctttgaattgtcgactcaaggccaagcaactatgcaaccaatgctatataagaagcactcacttcctacctttgagtttaactagcatgtcgattcagtaggcatagtctgatatgacatatctatatcggtattctccttctgagattacgtattctgtccactcaaccaggtcctgattgtatattgtttacaattgcttaactattgtgagtaatataagtagatatagcttcactagcactacataatgctatgttatgatctttgaatatttatagttatatttcccctttccccagtctcatattacatccttggcttatgaaggagctcagcatgaaaaagaatgtattctcagagatcgtacataacctcccggcactagcgggagagcggagcataggagcctatcaaacgtatccactaagaatgaatagcttcaataatacacccactttaatacaattgttttcgtcctcaaggcctaagacctcggatgctccgcaatgatagatggcagttgacagtgttattgtatccatatgtagtgaatttacccacatcagaatttggaacatagcactaggacggggatcatccatttgagatcaagattagaccgacgacagggctagaactgacctgtctccccacatttggtactagacacacggaagatgaaccgagtatgtatatattatggggcgaatgaggtacattgctgggggcgagggcatatagttggactaagcatcacgctcccaacaagcatactactacacggtagcaaactgaaaaggattgaacatgaatgaactactacccttgaatttttgggatcatgtctgagactggctacgcgtagctaaacgccggttcaaatctgtcatacatatttgaacttttttcttttcctatgaccagaagacaatgatttgcccaggctgaccagtacgtgacaccacttcattgacataacctttaaacattctcgaggacggtctccttgaactcccgctcaaccttctggcccttgtcatcagtggcggactctccgtgcagagacaggagagcaccgaggtcgaacttgggagacttcaggagcttaaccttgcgaatgtggacctgtagacatgtgttagcaatccgtgcgtatgccactctccaggttttgtggggggaaaaacgaacattctgcagggggtagatgccctgggtggacttctcgatctcacgtccaataacctcggggatgagcttgtgggtgagctgagacagagtgcaggtggaagcctcgcgctgaatgatctcggtcatcttcttgcgaatggcacggatctgggacgaagcggcgtaggtggtcttcttgatctggttggggcgtctcttggtgaaggcaatggcgaacaggcggaggaggtagtcgtcagtggtcttcacggtgatgttggcctcaatcagagtctgccacttgcggacaagagaacggagcttgtcggtggtgaagtcgagaccgtggaagttggtcaggcagttcttgccctggatctcgtcgacgcggagcttgaccttgcggaaggcgtggtcctcatcgttctggaggtcggcgagggagacctcgaagatacggcccttgagggagtcgttggcgttcttcaaaccgctggtgcggttgaccagagtcttgccgacactgataattccgttagccaatccaactctaaattcgccatgttcgattcgggtggtgtgcatactcgcgagtctggaaggtggaaggagcctgtcgacacgattagcattgggtacgggacgggggaaggaatataacgaaccttcacagagtactcgtccttgcgagtgaaggggtcgactgtgcgcttcttgatacccttcttacccttagataggcgcttgttcctgaacgatgaggattagccgtgtgttcgtgaattgaatggatgtcgtagatgcgcaagtaattcgataaattgaaagcaggaaaaggatggagagtagggcgcttactttccaacagccatgattgcgagttatctgtgtgttgttggaggacagacaaaggtatcgcaccgcgcgctcagagggtttcgacactcgactgggagggttgaaaacccacagaaaactcggctaagcgaggcgcgggccctagctgattatgtcatgaaccatcgtcatgtgatcgaacattaaaaaaaggttccactggattatcattatgtaatcacattatgtcatcatcgtgagtcgggccattgcattgcattacagtaacattcatacttgtcagatcactttgcgttgtattattacaagaatgtactccgtagattgttggctgttacaatagcgttcgtttgaaatgctatacactctacatgtgtatacatacttgtatgcctatgtatcagatttttgccaaaaccaatcctctttcctccaatccgcatcgagtcctccaaagtttcgaatagccaacatagaaatttccattcaatattctattgttttatataatgtagatcacttcgtggaaatcgccactaactgacatcacctatcggaagctggagacttattgttccgactccaaactaggcaagtcgccttggcatccattccgcgggcctactcccgcgcgagtcaacgctcctcattgcttcaactttcctctcatcccttcttatatttcaactttgtcgcaggttaagccaatcatggtacgtgctatcgaatttccttccccgactgccctgacccgcccgacccccccgaccgtggatagatgttaatttaaacagggcaagcgcaagaagtcaagctccaagccccaagggcctaagaaggtaaacgattcacaagtcgccaggctttacacccagtactgactgtgaaacatagagggagcctcttgctaccacattctcctgtctcttttgcaaccatgagaactctgtggtcgtcaagctagacaagaagcttggccttggcgatctatcgtgcaaagtttgtggtcaaaagttccaaaccggtatcaattgtgagtcgataattcggcctaaggcatcagtcgtaactggtttgactaacacaatgcttcaaagatctttctgctcccgtggatgtgtattcagattgggtagatgcatgtgatgcagttgcgaaggacactgccaatcagtatgatgcaccggtttctagtcacttgggacagagagggatcagcaagcagggcatatctggagagactgggcaggacgatggctacgatgatgatgaatactgatcatgggatgacggcgaacggcgcattaaggcacgatatcaacaatagtcgagttgtgagattcttgtatgtacacggtatttgatattcttgcggcatattcttgttgcatatgtttatcatatagcctaaaccccaagaagcgtctcacccatctagacctctaccccactaccggccatcaagtcaactctgaataggtgacttgtatgggaagtggaagtgccttacggcacctggaacagaccaagcaatggatggataatggaatactgaatttctcagaatttccgggtgaccttttaaccatcaacgtggtaggaaacatgacttttacatagagtaatatctgtcgccgaaatctcccaggccggggataatatacctatcaatcagtcagcatgtcaatcacaacatccaaggggtgcgatattctcacttcttctcatccaatccttgatcaatgaaagaggtcacaacccgaagtttagggaatctctccgcgaactcagcaacgcccgacgggctggcaatgaggttaaggaataggatccggtgttcagggacgcctctctcgatcagtgtctccacggccaatgttgcggaaccacctaggaaaaaaatcagctgggtggcaaggggcattgtacaacaagctcagctcaccagttgcaaacatggggtcgaggagaaggacccatcgatcagcaatgtcagtagggagcttatcgtaaaacagtttgggcatgcaagtttcctcgtcccgctggatgaggattttcccaatgcgaacagatcggcagcagtcgcgcaatccttgttccatggcctcgcctgcacgcatgatcgacacaccacagatctttccttcgaatttgacaccgaggtaggaccgtccaacgggggtagtgatagactgctcaacaacgggaaggtggttcaagccttcctccaccagcaatcgaatgatgcggttagaatagaagatgaaatcggcacggcaggttctcttatctctgatcatcctatttgtagtacaaaacatgagtctagggttaccttccatgtagaaatgggtcctcacgtcaagagagcaatcaactggggtgtttgaggtagcacgtgcacattctcgtaggagacttcctttgagactgtcgcagtgggcttctcgccatcgggccgatacaaaggaccaacgccctgtgcaggagaaggaccgctctcgggtttgctagccatgattttgttgcgtccaaagatgtgtgtgcgtgtgtgtatgtgggtcgtaggactagaacaaagagaaaaaagattggagtacgcaagttcacctaagacaagtacaagtagctcaaagtagaaggacaagagtccagagaggggtatataaggacagtgagttgtctcaaagccaagagcggggaagcagagggttttcttatcttttttgctatatctggaagctataccgcagtgggtgattctgccccatctcacccccctcggcctcttatcacctgcatcatctccccaatcaaacccccagacctcggatgtgctcaattattctattacgcgatcttctcaaaggaaattgcctaggtaatctacgcgcctcattgccaatcacctaggggtcactcctttgatgactgtgccacaccctttgggcgtgtgtaagcttcattgaacacgcaaggacatggctgtttcaagaaacgactacgttttactcaatccaataacccaattgcccatcgccaaaccttgattgccctctgagaaacgtatttcgccatcgaattcatcaaacaacgcgtgcgcatctggtttcgcacggtttgtgaaccgaagatggagaactcacaccctcgcaatcgacgactcgtaacctacggctctgctgccaaaagccaacccccgttgaataacgaaaggcctgtacactcatctgccgctaaaacaactcctaaagatatgcctttgcccaagtcgtcacgtctctcacggcccttccacaccaggttacagcgcgacaagaatggagataaacaaccgtctggatcggaaaaaatgaccacgacgcgaagtcttacgcaatcaaaacctatcatggaacctaatgtgtatgacttgccctcttcagacgatgaacatatgtctatggtccagagaaagcgaaggcgatatagccccgatggaaacaaagccattcctgtgacgaagccatccgtgaagccaaatgagacagaaatgagagatcgtaaggtgtcaccacaaatggagaagagggttcccaatagtcggtggccattagccaaaaagccagaagccgatcagcagacaaaccccgcggggtcaacgtcgtattcaagggctaggaggtctgtgcggaaccagaccaaggtatctactctcgagaatgaaatggaaatttcaaccgaagggagctttggggacggagagtccgtgcgaaagagctcaccggacgtcaaccagggctatgccactaaagcgaacaccacccctggtcgaaggaggctgattgattcgctcgggatcacggaacacacggttgaaacatctccagcgattgaaacatcaccggagagtccctctagtagtcagccgtctcgagatccagcccccgttgaccgagcttcgccaagtgcagctgtgaatgagtgtcctgccgaaagccaaattcaaggatctcctgcctcggtgccatctcatttacgaggttcccgcgtcacctatgcccgccagcgttcttttttggatgacatggttatgtcagaggacccttctatgcaggatgctccctctggcccaaagcaccgctctcagtctgtccaacgtcagttgaattacgaggctacttccagtgcccgtttaatcgtgccaattgaggataccaacgaggatggatctgtccgaagtattcatgagctcagacaagctgggggaaacgctcgttaccgaggcgccgtcgaatctatctttgaggatatcgaagatccgcaaaactcattgacgggtcgatgcaatgcaattctccaactgtgtggtaaacttctggatactggtctcagacggcggtttgtcgagtgcaattttgacaaaaggcttgtggattgtctatctatggatcttcaagtggtccccactattctagctttctgtgcctacgcactgggatcatcggatgggcacatgtcttatgttcttgcaacttccgcatggcctaagctcctgagtgcttcgcctgccttattgggcatgcaagacgatatactagtgaccgcaagagctaaagccagcggccttccccggcacttgcaaaatacaatccagggcactattccacagatatccgctgtgctttttcccgataccgcatcgtcgaagctgtccccatgcactctggcgttgtattgcctgaggtcgacgatctccacgatgcaaaccaagggaaagaaccctagcctctccacatctcttctgaaacctttggttcaagtgctcgtgtccgaaagccagcgttgtgtttcattggaaaaattacacccggagagctctcaaatactgtgcatgggcttttcaatcttggaagcttctactgcattggctgaatcgctcacaaaagagcaatgggatattctaggtccgctctctgaacttcatagcctgctctccttggagtcgggcactgtcagccaaatacaacccctttacattcgacttatcttgaatgtgaccaacagcaacccctccttctgtgatagatttgcaaactcggagatagttggggggctagtccggattgtctctgcgaactttggtgacttgaccgaagatgcgcttggacaagcgaataattctctggacagcgtgatattggcgctcggcgcacttatcaatcttactgaacagagtgaagcatcaagaacgatttttcttcactctgctggttcctcgaagcctttccttgatcaattgttgcatttattcatgactcatgtcgattccatctccacggtaagcttttgatcttttttgatttcgcattttgccgacgcattgaactaactggatctgcttaggctcattcggtcttggaagtacaccacaatgttgccgtgggatatttggccgtcctgttacttacactcaatttggatcctgatacccgatccaaaatcaagagctcactcgctcctaatggattagcagtggtgatatctaccgttgatgaattcctgcaataccatcagaagattgaacaagaaacctccactttcccaactcaaggacaaccggcgagtggtttcttatccagattacaagaacttgtcactcggattcggttggcagagcaatgaggagcgtctatccatgttttgcttgacggcagataagtgcgcgcttggtcttcttctaccggcatttcttcagactcgatgacgtggatttcttggtctgctggcagcttttgataccccttccatcatcacttttaattgaaccatttacgctgaaatgtcctacattcaatatccacctgggcagatgtccatcattgagatcgtcgtaagataatgacctcaggtcaaaccagacctcaatgttcaaaaaaagtaggattcagtagtttttctaatacagtaattttataaagaatatcaaatcgatggtcatagaccctgtggacctacacgtaggcaattatttatagagcgctcagccctgcctaagtggagttggagaaactgccgtttgcattgtttgcaggtcacaaggagttggagctccgcatgcttcgagggatttgccaccccccggcgacctcgtttctgaacatgtgtctctgaatatctcattgatccagttccatcaatcaaaagatactgtctatctgactttatcatcatcaatatctctcattcacattggtggtctagctgaatcttaccgcactacacaagatgccttccgcgcctaagcagagaaagatcgcaatcgttggcagtcgctccgtgggtaagaaagagcacctttttcacaacccaaatctctgtaattgcgaagagctaacacttatcttggataggaaaatcttccctcacggttcgctttgtcgagcaccacttcgtggaaagctactaccctacaattgagaacacattcagccggattatcaagcacaatggccaggactacgccactgagatcgtcgacactgcggggcaggtaggtgaaccctgtgcgagattaccggctgtttactgagactattcattctacaggacgagtatagtatcttgaactccaagcatttcattggaattcatggatatatcatcgtctattcagtggcatcgcgccagtcatttgacatggtccgggtgattcgtgacaagatcctgaaccacctcgtcagtcactgccgttctcacaaccagtacttacgaaccagcgtctaatatttcctatttcctctagggagcggatgatgtacctcttgtcatagtaggaaacaagagtgatctcaaacccgatcaccgccaagtcaccctcgaagacggacgtcagttagcggaggagcttcactgtgctttcaccgaggctagcgccttccttgatttcaatgtctcgaaggcctttgacctcatgatcggagaggtcgagaagtctcagaacccctcccaaccaaccggcgacaacaagtgcgctgtgatgtaatacgggagccttctaccggaacgcgtgtgtctctctcccggggatggtaagcgaagccatctctggatctctggatccatgagtcaagaaacgtggagatctctttcatcggagctgacaacactatatcttgctcttttgatgtccacccaattcagatctacggatatcttgtttgctaactcgattattgacttagagatcatcaacgccaatttgataacaagcttgatggcttcttctcgaggccttcctcttctctttggccctatttctattgcgtctttctgaaccaccggggttattgcatgaataatgagttttagggtcgaattatggaacatggatcggtaccatgcatagagtaatgaatctcaattgaaacaggcttctcgaagtattcaaagtgttgaatctcttgatctatagaaccatccgtggccataactagcctgttcggaagtaaaccggggaacccttatcgattaagtaatgcgaccccttgaggcccaagtgcgtggaggcacgcactttgattttcctcgtttttacccctccacaatttgagtcacccctctaccacttagactcccctgaacctctgaactccaatcgtcaatatgctggacctcgccgactttgtcactgagcgcggtggtgatatcaagaagatcaaggagagccagcagaagcgatttgctccagaggagaccgttgatgaagttgtcgcgctctatgaagaggcacgacgcggtatgatttctatttttttaaaagactagcgaaatcttactgacaggtacagcccgatatgaggtcacacagttcggttctcaaatcaatggagtccagaaggcaattggaatgaagaagaaggtaggcattttctagctagtctagagtatggggagatgcttatgcgttctcagaacaaggaagacgcaaccgaattgctcgcacaaaaggcagagcttgagattaagaagaaggagcttgaggaaactgctgtcgccaaggagcttcaacgcgaccgaaagattcgcacgattggaaactacgtccacgaatccgtgcccgtgagcaacgatgaggtatgggttatcaagtcgcctgggaattgaatgcgctgtgagactaacaagtctatttctggctacaggcagacaaccagctgatcaaaacatggacccccgagaacgccgaaatgcagaagccaggttgcctctcccaccacgaagtgttgactcgtctcgatggatatgacccagagcgtggtgtcaagattgttggtcaccgtggatactgcttgactggatacggtcttttcctcaacttggctttggtcaactatggtctggagttcctcttcaacaagggctacacgcccaatcagccccctcaattcatgctcaaggatctcatggcgaagactgcgcagctcgagcaattcgacgaagagttgtataaggttaccgagagcgaggataagtcgaccgataagtacctcattgctacctccgaacaaccattgtctgccctgcacgacagcgagtggctccaggacaaggaactacccattaagtaagccactcatctcgcacaggactaagcccttttgctgataagagaaacaggtatgccggttacagcacatgctaccgcaaggaggctggatctcacggcaaagatgcctggggcatcttccgtgttcaccaattcgaaaaggttagcatagatccaaatgccctggattttcgtgttctaaccccatgcagattgagcagttcgttcttactaagcccgaggattcatggcaagcctttgaggacatgatcagcacttctgaagaattctaccagtccctaaaactcccttacaacattgtcgccattgtctccggcgccttgaacaatgcagcatccaagaagtacgacttggaggcctggttcccattccagcaggagtacaaggagctcgtctcttgctccaactgtaccgactaccagtcccgcgctctggagatccggtacggcgtgaagaagaccaccgatctgaagaaaacctatgtccatgcgctgaactccaccctgtgcgcgacggagcgtactctctgctgtgtgctcgagaactaccagaaagaagatgtaagtgtcgaaaggtcaccgggtgaatctgacagtagctaactatcatttagggtatcgtggtcccagaggtcctgcggaaatacattcccggtgctcctgagttcctcccttacaccaaggagcttcccaaggatagcacatccaccaaggccaaggggaaggccagcaagggcaccgatgatgccaccaaaaagatgcaaggtcttcaggtttaaggagatatcccacgatgtaccttgagatacaaattacaaattacgatggtttagttcatgatttacaggcatacgtacacaggaatagtcggccctgcatcctgcctctgtccttgacaacgtagggctttgataatctgatctatttgacaaaggatgcatatattaaggatttttctatttaagaagactccagaagaatccctacaacatagttgatttaacaaagacattcaaaaagctatcccgaagatcatattaacctaaatgaatcaaatataaaaagctctctagactgtgtgttttctggaaggaaggcatcggctaagtcccctgatccaaacttctcctttgaagctaacgcaagttcaatcctcttttctatactgtgtcattcctccatggaagtcaaaactcaaggccaaagacaggttaaggagcaaggactcagaattgtgagtgagggtaagaagaatctgccacaaaatgtagtatatagggtgaaaaaggcgtaaaatgtgattcagatcttaaatattattctgaattagatagccaaagcagcaacataatataactagcaaacaaaccaatataacaacactggagttcacaaatatcgagcaattgtaggacttggctccaaactgcaagcaattttcaaaactcgaatcacttggagcctctttccaaccgccaagggaatgcctttttccaataccacactactgatctcatcgttgtcagctttccaagcccaaatatacccggcttagagaaataggcctctgtcattgttaaaagatgggagggattttcgctgttcaagccatcctccaaatcttcctcctcggttactggatgaccacgagtagcttcacagcaccaacactcagtcgtacagtgcccgatacccctgcccttagctagacagcgcttttcgcaacagccacagcttcgaccacagcagccacccctcctcatacaagcctgaataagctcttttcgaagataccaagcagggttctgtcggatctcatcatatatctttctcaacggtctttggggaagcatactttccgtattgtataaggcctgtgctatgttccacgtaacctctttgatatcctcgaggtcgctctcatatacttgaatttcgtccttggtgggatcttctagtgatctaaagtccttttctaaccgttcatgggatttgtctggtcactcgtgaaaaatattcgagttgtatgatcgtcgcaaagagcctcgaaggtatttgaagacccctgccgtactcaaagagtcgcttgttctcgtcttggtaattccgaacaggcttgaagtttccaaaggaatcgaacatttgtaacggatctaatcccagcaacgagattttcggcatggtcttgcggtccgccatgttctaagtcatgttagtatgattgtcacgtagataaaggtgggaactatttacgaacattggattcgagtacggagtagctgcaagttgtgagttatatctaggtaaactcgtgagttgattttcaatctaccggtaaatactacatcatctttcgccgcccttgcctaaagcagataagctcatgcaataaacatgtgatctgcatgtgattagtcaaaactttgaattaaaaaaaagaaaaagtctttgccccgcggtgcccctccataggatacagagagaacagagagattatatgcagaatagtatatctcaacatctatttaattatataaatagaatcaatcgatagtaatagctatatgaagtcagtgtaggtatgtagtgcaaatggtaagtccccgaaaccaaaaaaatcatcaagtccgattccggagaccttggaggcttacttaatttctattaagagtcatcccatatgaatcatatccccatcctcctcttccctgcttctttctcttcaatctgctacaatctgctacacacttcaatcatgtcaatcgcaagagatatccgtcctcgtcaggacgattccttcctcgctacctcccccaacgcctccttccactccccatccagccacagctctgtcctgaaccgtacaattccagtcaatgctaagcctctgaagccattcgccacagaagatatcaaggtcctgctcttggagaatgtcaaccaaactggccgtgatatcctgtcccagcaaggctaccaggtggaattcctgaagtcttcactctcggaggatcagctcattgagaagattcggtgagtcgcaatttaactctctatcggtgactcacttggctcatgaattctgttgcctttcagggatgtccacgtcattggtattcgctctaagacaaagctcaccgcacgagtcttgaaggaagcaaagaacctgatcgtcatcggttgcttctgtatcggtaccaaccaggtcgacctccaatatgccgccgaccagggtattgcggtcttcaactcccccttcagcaactctcgcagtgttgccgagttggtcattggcgagatggtcatgcttgcacgtcaattgggcgaccgctccaacgagatgcacgctggtacttggaacaaagtgagcaacggttgctgggagattcgaggaaagaccatcggtatgtggcattcttacaaccattctgttgttgggttgtttagctgacttttcaggtatcattggatacggtcacattggtgcccagctgtccgtattggctgaggcaatgggcatgtcagtcatctactacgatgttctcaacataatgtcattgggcactgctcgccaggtgaagaccttggatgatctcttggccgaggctgatttcattacctgccacgtccccgagattgccgagaccaagggcatgattggacagccgcagttcgagaagatgaagaagggaagctacttgatcaacgccagccgaggaaccgttgtggatatccccgcactgatcgatgccatgcgcagcggtaaggttgctggtgccgctctggatgtctatcccaatgagcccgccggaaacggtgactacttcaacagcgagctgaacccatggggggctgacctgcgctcgctcaaaaaccttattctgacccctcatatcggaggaagtaccgaagaggcgcagaaggctattggtgtcgaggttgcccaggctctggtccgatatgctaacgagggttcgacccttggtgctgtcaacttgcccgaggttttcctccgttccttgacaatggatgagcctgaccacgctcgtgtaagttttctcgcgcagtcagtcgggtttgcaatgatactgatttggcctaggtgatctacatccacaagaacattcctggagtgttgagaaaaggtagagtacatttgattcgaatgctgtgatctttttaactaacaatgccacagtcaacgagattattggtgaccacaacgtcgacaagcagatgactgacagcagaggcgatgtaggtttatccgtgtttctcatacaaaaacccacgcagaaacttactgttaataggttgcctacctgatggccgatattagcaatgtggacgctgctaccatcaaggatttgtataccagactcgagagccttccttgtaagactacatcctttctctttcgcatgaacttaaaagctaacaccacttcagctcgcatcatgacccgcgtgttgtactaaacaaccgattcaaaaacaagctagcccccgggctataatgctttaatcaacttaagactgatgaaccctataggggctcaatctcaattgcatgggacactctcaacgaggccctgggatactacaaggttgcaattgccaactccttagtataccgagttggatacgactgatgtaaaagcggtttagtgtatattttgtgattaccacgcaccatctactagagaaaaagctatgacatgaatgttttcattttcattttcatctgccatctgactggctcagtaaaatacattaagtgaaagctcgctagatatcatgaccctagcctcgactcccatctctgaatccgggactgcggctccttcttcgggatggaggatcccggcggtaatcacgtcgacctgtcgagcgccaatcggcgtttgaatgcgagccatgctcaccagagtctcgcgagcgatcgttgccgcggtcgccgcgctcaccgcggtcactgccacggtcacggtcactattgctgtagttaggaacgtaagagtccaggttccctggtctgggtcctgggcgcccttgtccggattgatttcggcgatcgtctctcccatcaggtctgttggactgcggtacttcccacggcgggcgggttggtacgggaggacgcgggggtaatccgatatctcgttgtgtaggtgggaaaggcccgcggcgttgcgggtttccgtgaggtgggtggtgtccatgatttcctggcatatttggtctgcctccacgaggggggccggggatgcggccatgtcgggagtctgctccgcgagaaccagagcttggccaagcgccgttgcttgagtcggaaacgggtgggggaactgggggcattggcacgcgctggctgcggaacttctttcggtcgagttcgtgggaatctgcgaattgggggatttcgccgggtcgcgctgggagtgggggcgtggtgaagtatgggtgcttcaatgcatccatggcgttgatgcgtttccgccagtctaatttgaggaattcgcttaatagagaaatagcggccgggtttaggctgttacatcgttagttaggggcccacatcgtcgagggaaaagtaacatactccttgaagactccgtggaggttcccacgtttgtaggcgaagtttttcacaccctcacaacccgggagttgactccatccgggcatattctcctcggtgggagtgcccacaagattgaatatcagttctgcttggttaagatcgctgtttccagcaaggatgggcttgcccttgaacatctcgccaaagacacatctatagaatattagaaaatgataagcctggctaatagggatggaaagcttacccaactccccacaagtcgatagcagtagtgtatttccgcagctgtagcagcaactccggaggacggtaccatctcgtgacaacaagtgcagtgtattctcttttggaatctccacctccttttccgggtaatggaggggcatcatcgtagggccgagcaagaccaaaatcagcgatttggagaattcctccattgctaattagcaggttcgccgctatttattctgttagctcggaatcatggtatatcagcattcaacacccacctttcatatcacgatgtaggatgcggttctgtgaaattgttagacaaatattgcaaggaaacgtgtttcaagatgatcgtactgcgtgcatgaacttgagcccttcgaggagttgcatcaagtagcatttgatctgtggttcggtgaattgaactgccgggttttccaggagcccagacaggtcatgttccatgtatggaaataccatgtacatgctcggctttttccgcccttcgcctttgcctcgctcgattgacatctccttgagctgcaaaatgtttgggtggcagagtgccttcatgagtttgatctctcggatggcggtaatagggaactagcccaaatgtcaatatatagctaataaagaacaaagagcttgtgaacttacgccttctttctcgtgatgcatgaggatctttttcaaggccacaattttggtgtccttcttagaccttgctttgtagacctctctattaaccggtcagacggtttcttgcagttataacgctgccgaactcacccgaatgttccttctccaagcttgtcaaggaattcataatcacggatgtgcgaacaaccagggaaacgggcctggccattctcgtacttttccagagatttaatctccatgctgactcgtcgcttgagctggtcgcccaccccggtgggggaagaaagagctatctgatgcttgtgtcaaaattatcgaccgtcgtcaagctctgcggtatgctttggtttgatgttgtgttcaggtacacggaggagggttcgagaagtcttcggcgacagatgattgtgggaaaagtgtcaagatgaatcagcggggaccttgtcggagagagccacgcgcgtcgagtgtgttataagacaagtccatatcatagtacaaagcatgtgtgacgagttcgcattgttcaaagcccgcgcgtggggagctcggccacgcaggaggctcaatataaacctgagtaggaaccagcccagtcaaggtataggcgaaataggagtcagacgactcttcaataacgatatagattattgttctgctgcttgtccttgcgaacaacccaaacactgcgctgcggtggaattcgagtgccgtcacgggtcacgtgctaccaacctctccgttccccgttgaaccgcagaaccctctgtcttcagatccgattcgagattggcgttctgtgaacaaacaacagccatttccagcacacagtacgtcttgcatgcacctttctctgttcatgtgaatctgtggaaactaatttctttccaatctacacagtcatggcgggcaactcctcccaccctatccacatccacccggtccgaccgctctaccgcttcactgcgactgcattgggcgcgagcatgtggttcttcgtaaggatcgcctccttttgacatggagacctcgtactgacaggacttctgcgcagctcatgtaccgggccaagaaggatggtcccgctctgttgggctggaagcacccttgggaccactgatccgaatataatcgtcgatttcatttttattgcgcaaccgcttttgtccctcggggcagcggtgatagttgggtcgcattgcgtactgtgtacttggactaggtagagaggaacagcgagccgggtgttaccgagcgcatgtcaaagccacaagttcacgatagctatttaccagccgaattgtatcataccctttcttttcaattttctgaaatggtaaactatggcctgagtgattgggacggagcctcattagatagatgactagatccagattatgacaatctaaatgtctatagttatgtacaagaatagtcggccgcatttgcggcctatgtcattgaaaaagtcatgatccagttgacccgacggtggtctttcttagtctttcaagaagctattttgtatggatatcccctccccttcctagttttgtgggtagacggcagaaaaggacgggaaacgacctccctatgtaaaacctttggtttgatagcgtacaacgtgaatgcgttgataacgtacttcataggcgcagtccctccaacagcactttgtacatcttgcgcttcttgcggtagttttgctgcaagcgggcacgagtatgtccaagtatctgtgccacgcgagggaatatggtcttctctgctgtccaggacaaaacgaagattccgaatgctagcgcaagtagccaggacttgaaaccatcagacatgaaagtcagttgcatcacctccgacacccagttagatggtctaaagagcatatagcccgagaccaagatgttgacgatgatcgtacataagtacggcactaaacgatcatagtcagtatctagatgagcaagaaggggaagttagtggtgtgcttcttaccattctgagtcattggtttccggaatggcggacccgcactcagaacaatgctgatgaagatgtactggaaacaggaaaacaagaacaaagaagtattctctgaattgagaatgttgctcttttctttgtccaattgtggcggcaagaacctgcattgtttgttagaataattttaatgggtatattgtaacggttactgaccatggctgtaattgaacggtctggaaaactgcaaattgcgacagcacaactagcaagatctgcccgagcaaaggtgtcaataccttacgggaaacaagatcagcagttggccgtttccgagacatcgtgggagcaggatcagcccagcccactagaatgaaattagctcgaggactcagattttaggagagagaccactcactgaagaccgcaatgggcataatgagcagaagatcgataaagaggaacttgaggccattagcgatatatcaaaactgttggtaataagcccacttacctggaaatcaccaagatttgaccccgacgtgtacaggaagctgaccgaggagaattgaatggcggaataaagactcatgaacttgaaacaggagaaacttgtcaccagcgcagctcgaccttccctgatcaccgtcggaacacaagagatttcgaacacgcggctagtaaagggtgcggcaacggacgcctcggcgtccgacagtgaaataccaacatctgcggccttcagagcgccacaatcattggcaccatcaccgcaaaagccacagcagtaatcaatagactgaagtttctcaactagttcgtgcttctcgtccggggacatacgggcaaacactttgccgcatacaagtacctatacagtacacattagttcgacgcatggtaaaaaatggtaatggttagtacaacggctgcttaccttgttgagtacatcttcattcccgaagtcaaccaaccatctaaaggcatcacccgtgacagcaacagagtattcacgctcggtgaaaacgtttcctggaattgacatgtcgacctccgcgtcgttgagtggctgcaattccattagctgctaataattggatatagggaaaatatatcttaccaagagtgttcttgggtccaagcggaggtcggagttgtccacgcattcccatatgagagaagctttaggtgcaagaccaggcgctggagatcgttaatactgagctatggcatggattcggtaaacaaaccttcgataaagtgcgggataaagcatagctcatcacgtccaagcatgttgcattcacgagcaacactgatggcagtcaagatgttatcaccggtgcacattacattgcgaatccccgcctcgttcaactcggaaatcacaccggcagtactgggcttcaacttattctcgaatatgatgaagcccaagaattccaggtcagattcggcttccgtccgagacattttttggacttttctccagctcaattttggttcatatttggaagcacaggcaatcacacggtatcccttgtgagtgtagtaattcaggagatcttcataatccgaaggaactgcaaaagaagtatatcagcaatgcaagcttatatagagagcgtagaaagcactgacgagttccaggaatacatatgtccataatgctttctggagcacccttgacaaagaaacttgctccgttgtcgccaaatttcctgacaacgacacttgcgcggcgaagattggagacaaattcgaaactccgcagaactccaagctcgagtgggttctgaatattgttagccatcaagttgtggcttgaatataaatcaactcacatttacatcaccattagtctgtccttgaggaggctttgcaactgacggcgctatagtgtcatatttggggcttgtctggtcagaaatatgatcccctccctcctcaaacgtccagttggtaaattgaaacatcttgacatcgagaggatctcccaacagctcattgtccactaccctaagggaatgacacgtagccatggcgtacatgatcttcctttgctttttgatatcgtattcggagttagcatcgggggaaggacgaagaaacccgtcattcgtctcagagagcaagtctgaaaatctagagattcatcttcagcgccggcttaagggtcatacttaggaacagacaaacctattggcacgggtgactatacgcattcctaggacatccagtccgtcttctgtgagggttcctgttttatcaaaacaaacaatgtccagctttcctcccacgttgaccctgttctcacgtattagcgtcgaagttaagacattattcatcggaggtcactcacttctgtgggctgatacagaatatgttctgtttcttcagtcgtgaaagtgcaaaattggttccgatggtgagtgtggctgggagagctggcggtacaacaatcgtgatcagatcgagggctcgaattatgatcagatgccaagcgagctatatttcgttgcatcagcggccaacataaccttaggaaaatcgtcgttccgagcattaacttacacccaatcgaacaaagttaatgaatgaagcaacgaatccgatgagagcgacaatccccatcacggcgatgtagcggaacgagtctcggtagaacttgaatccagagggtttcggaaaaagcatcgatcgaactagagcccccttggttgtcgaaaagccagttctcatgacaattgccaatgctactgcttcatcgtcatcaacattctggggtcgtctagcccggattactttggttccgctgaagaggaagtgtttagcaacatgggggtggatagaaggggtactgagatcgagatattggatggcgtcatcggtgagtggtgttttagacacagggacggattcacctggtcaagttagatgtatgcatcaatactgagggtttttacgaaccagtgagcatgctctcattcacaatgcagtcacctgacaacaagatacagtcacacgggacctggtgaagcgatgggtcggaaaattcataaacatcaccaggaactagttcttgggaggaaacggaccgccctgtatatacaatcagtttacattcggtgagatgatgcatcgaacaaactcacagaatccacttcttagaacgcgaacatcacactcgaaaagagatatctccctgagccgactcatagtctatagtagcgttagtttcagataatggtcccattcttgggctgaacgcactgatttcgtctctagcacagtcgttgctatgctgaaaaacgatataagaaagatacagacggcgtagtagtagtactcatccatggaccacagaacgagacttgcaatctggaagatataaaaaggatgaaatgcctatacactgtcagatatattgatggaacaactagaaggaaaactgacctcgtcgacgagaagctgaggaattgtctttgcatcaatttcgatgtcgttacttccgaatatctgttccctgctgtctcgttcatcggcatctaatccacttcgcatgactttggcattagtccacgaaggatctttccagccgcttatcaagcaaaatttatcctcgattggatgatagaagaacttcagatatcgatagtcgatgaagtgcagagaggtaatagtcgggtcattatcttcatcgtaggtgtgattcagtgagtcggcgaagaccgtggaaagcggacgtccataaggctggctgccaactttgtggatggtgaattggttccattggtcctaccatgataccatggtcagatggttaatgtatgggattgaagttcacaatcttacctcaatagccacccattggcattttcctaatggggttgccttcccaactaactttacccgccatcgtggcagccatcggaagagaagccaggcaaatccaccggtcaagatgcaaagggcaatatagacagcaaaccctcctgaactcgtggagaacccagcaaagacagccgtcaaatcttccgaggcgagatagactttttgattcaaccgactgccggatcgtcggtctcggccatatgagctggcggacaggtagcgagaaagaagtggatgttcaaccgagtcgcgggaggtagacatccgcttagacacaaaggatcccctgactgactcaacatctgcatccccaatgccgtgtaaagattcttcatcaagctcgctttgctcgtccactgcagattcgttcgacaattctgcgaagtcttccccgtcctggaagtatgtaaagctcaccgtagagcctgctcggttacggcggtgcgcgaacgaggcgacgcttgaagggatgctttccgagatcgggccatcgaagacctagtgcgagtcagatcctgcgctgaagtctgcacgtgagaatggagatttgacatacctcattacgggccatctccacatccgacacggcgctcacactagagaagtatcagcagggattgaagggttgatttgggtaggaagggagcatagcaacctgcttcgcatggaatcgcgtcgcattctgtttcgaggcatagataggtccacaggaccagtccccgagggagagtgcggacggggcatgtttaagaggtcaactcggccgattcacaaagccaatagccttgcagagtgtcgtattatggggctttcgtaaagtcgtatttcaccgacactggaccgaaggaaaacatttatcgtagagcgcgagttcgcacaaaagcagggtgtgatctggagcttatcggcgtcccacagcggagagcgacttatctccatgtgactgtccgatagctttggcttactaattatatcggaccaaactttgaaatcccccatgcagggcatccatataaagttgtatacgataacggcttctatatgccattgtgtatattgacaaggttcgataacaatctagaagaacggatgagtcttggcatcttatgtctggactttaacggacatctcattggccactgaatcatcgacggggttttgatctggaatgatacaggaggatctacatagccctgctcaaggctccgaagtatttcaatccttgtgtatttacccaaatgacaaaaagtacctttgtacatcatcctacgcgagtcttgaacgtcatcgaatttcatgtagcctaggcaaaacaagcaacttgtccacgggtgtaaaatacccgtttctataaatatatatcgcctattcatgggggcgaatctcgtcctagacctattttcttaccaagcaatccaaaaaaaccacatatagcaggcgaatgggccaagaatcacagtcagatagaaataattcccagttccatagccatatttggaattggagagaggggtaatggtccaggacgccaccgggagcgatcagatcgaagatgatcacagaagacaagatatcaagactccttgacatggaaacgacaagatagaaggaataagaaagataaaataaagctgtgtccagcgtaacaaggcgcgacaaatcaaaagcgtatcaaaaaggtattgttgggagaatttgcagtctttgcaggctcaaccagaaccgtcccgccaagcccctcggccacagggcgctaaggatcccaccatcttccagactctcttcccccaaaactgaacgggtatcaaattcttccttctttctctctcctcacctcattccctctccctgccccttttcattccccgttcatcatgtctgagcccatcagaaataagaaggcggacttcccggtcgcaccgtaagcatcccccctcctcccgtttttttttcccacccttatcaaaagcaaaaaaaaaaaacatggatgctgacttgcagaaggaccccgcaaaacacgccggccaacaatgctcctatctcatctcacgcccagcagcctggtgtatccagcatcgaggagggtaagtcatctcttttctcgtattcaccgacatttctttgaccgtgctttctgttctagaaacctttgacaaagctacggctgcctcgctctttgctcgcaaccctgctttggtatccatgatccaaggcaagttgggtcaactcgtcggccgctcgtcaggctacatcgaatctctccccccctccgtccgccgccgtgtcgctggattgaagggtatccagaaggagcactccaagctcgaggcccagttccaagaggaggttctggaacttgagaagaagtacttcggcaagttcacgcccctgtaccagcgtcgttctactattatcaacggcggcatcgagccgaccgaggccgaggttgaggccggaaaggaggacgaggagagtgatgaggaggagactaaggaggagcccaagaaggaggagggcgaggccgcgaagggcatccccgaattctggctttctgccatgaagaaccaaatctcgctggctgagatgatcaccgagcgcgatgaggaggctctcaagcacctcaccgacattcgcatggagtaccttgaccgacccggattccgcctcattttcgagttctctgagaacgagttcttcaccaacaaaactatctccaagtcatacttctacaaggatgagagtggatacggtggcgatttcatttacgaccacgccgatggatcccagattgactggaaggaggaccaagacctgaccctccgcctggagagcaagaagcagcgcaacaagagtaagtccactcgaatattgagatgccatgttgaaactgacagctgacgctcctttagacaccaagcagacccgcgttgttaagatcagtgtgcctaccgagtccttcttcaacttcttctcacccccacagccacctgccgaggatgacgattcagtcgccagcgacattgaagagcgtctggagcttgattatcagctcggtgaggatattaaggagaagctcattccccgtgccattgactggttcaccggtgaagctctccagttcgaggagctcggtgaggatctggagggtgatgagtttgaggatgacgatgacgaggatgaggatgaagatgaggacgaggaggagctcgggtcagaccgtgaagtggacgaggaggacacagacgaagaggtatggcataccacactcaccgactcagatcacttgctaacttcgttccaggatggtacttccaagcccaagaaggaggccgccgagtgcaagcaaaactaaaccaaaaaaaagttgccggtggagaatgcccaacgtgagattactcgtactctctgatattttgctttgctttctgcctttttgtgcccccctgcgttgacctctctatcttctaatactcaatcaatacttgacataatcggtgtgtaattctcagttccggcgctgtaaggatttggacccatagctgagacccctggactgtcttataaaaggatagtctacgggtatgtggctattctggtatgtatgtatacttgatatccaataatcaggaggcaataccagagacgatacctacatgtaggtattaaacaagcctcaggtacaatacgactttctccttcataagtaatagtagcataactacggagtacatgtagtaaataggagtataatgtacatactagtacgtaaacataaggtacagtgtagaccaagtaggatggcggtgacaggctgtggggtgtgccgcccccccagtatattccctaagctccttcaggggctctcgctaaatggccagctgttagtctcactcaagggttttctttttcacctccatctaattcttatctccaatctttttattctattcttttgaaatatgagatgaggggttgagaaatccccctgtctttggactacctgtatcgccttgaaccttcgatgccctacctccgaaaacacccatcatccccggagcttctgcaaatatcccgcttttattgcatcaaaaacgattaacgacctacattccatatggcgcacacctatgaggtcggcacgcgggcctggcagcccgacccgacagaaggatggctggcatccgaggtgaaggagaagctggaggatggagagaaagtgcagctaatctttgagttggaaaacggagaggtaggtgcccttggaatactggacgcgggctgcgcagtcctgtctcttgagttttccggggttgctgacactgtcttgatcggggcagacaaaaacgttggagaccacgcaggccgagctgaagatcgataacaaccccaaactacctccgctcatgaaccctgctatgcttgaagcaagcgaagatctgacgaatttgtctcacctgaacgagcccgctggttagtcttgctcctacgtgtccagtgccaccctcattgctgacggccctttgaagtcctccaggctataaaactccgctatgctcagaaggagatatatacctacagtggtatcgttttgatcgcaaccaacccctttgcccgagtcgattcgttgtacgtgccgcagatggtgcaggtttatgctgggaaacaacgtgcctcgcaggcgcctcacctgttcgcgattgcggaggaagctttctcgtaagaatcgtccagctgttacatctctgaacttgatttcgcttacacttttgatacagtgacatgcttcgcgatggaaagaatcagacgattgtggtttctggtgaatccggagcgggtaagaccgtgagtgccaaatatatcatgcgctactttgcgactcgcgagtctcccgatcagcctggaaaatataccagcagccgcgcagatgcaatcagtgaaaccgaagagcagatcctagctactaacccggtcatggaagcgttcggtaacgccaaaaccactcgtaacgacaactcctcccgtttcggcaaatatatcgagatcatgttcgatgaccgaacgaacatcatcggagctaagatccggacctatcttcttgagcggtcaagactcgtcttccagcctctcaaagagcgcaattaccacatcttctaccagctggtagcgggtgcttctgacgcggagaaacaggatctgggtctcctggctgctgaagactttgagtatctcaaccaaggtggtactccagtaatcgacggtgttgatgacaaggccgaattcgaagcgactaggaagtcgctggctgtgattggtgtgccgcaggaagaccagacaggcatcttccgcgttctcgctgctttgctacacctcggcaatgtcaagatcacagctactcgcacggattcgtcagtttcgtcgaccgagcctgcacttatccgcgcgtgtgagatgcttggaatcgatgctacggagtttgcgaagtggatcgtgaagaagcaacttatcacgcgtggtgagaaaatcacctccaacttgacacaacaacaggccttggttgtccgagactccgtcgccaagtttatctattccagtctatttgattggctagtggagaagatcaaccgccgcctcgctactgatgaagtgcttgagcagttcaaatgcttcattggtgttcttgatatttacgggttcgaacatttcgccaagaactctttcgaacaattttgcatcaattatgccaacgagaagttgcaacaagaattcaaccagcatgtgttcaagcttgagcaggaagaatatgtccgagaagagatcgattggacattcattgacttttcggataaccaaccttgtatcgatcttattgaagcgaagctcggtgtcttggccctattggatgaagagtctcgacttcccatgggctcggatgagcagtttgtcatgaagcttcaccatcactttgccgctgacaagcaaaagttctacaagaaacctcgcttcgggaaatctgcattcaccgtctgtcactatgcagtcgatgttacttatgaatctgatggatttatcgagaagaaccgtgacactgtgccagacgagcatttggaagtgttgcgcaattcttccaatcctttcattaaggagattctagaaactgctgcggccgttcgtgagaaggactctgctgctatgtcatctaagccagttgcagcagctccagggcgtcggattggcgttgcggtcaatcgcaaacctacgcttggaggaatcttcaagtcttcgctgattgaattgatgcacaccatcaacaacacagaagttcattacatccgttgcatcaaacccaatgaggcaaaggaatcttggaaattcgaaggtcctatggttctcagtcagctgagagcttgtggtgtcctggaaactgtcagaatcagtactgctggctacccgacacgatggacttatgaggaatttgcggtccgttactacatgttgtgctattcctcgcaatggacctcggagattcgggatatgtgtcatgcaatccttcgaaaggccctgggagatgagaagcaagataagtatcaacttggtcttactaaaatcttcttccgagctggtatgcttgcattcctggagaacctccgaacgtccaggttgaacgaatgcgccattatgattcagaagaacttgcgtgccaagtattaccgccgccgctacctcgatgctcgtgactcaattctcaccactcaggccttcattcgaggtttcttggcacggcagcaggcccatgagattcgccggaccaaggctgctactaccatccagcgggtctggcgtggccagaaggagaagaagcggtacaatcaaatccgcaaaaacttcattctcttcgagtctattgccaagggattcctgtgccgacgcaacatcatggactctattaatggaaatgcggctaaggtcattcagcgtgctttccgctcctgggttcaaattcgagcctggagacagtatcgccgccatgttatcattatccaaaacctctggagaggaaaacaggcaagaaactcctacaagagacttcgtgaggatgcccgtgatcttaagcagatttcttacaagttggagaataaggtggttgagttgacccagtacttgcaatctcttaagcttgaaaataaaaccttggtttcacagctggaaaactacgatgcccaattgaagtcatggagaacccgacacaatgccttagatgctcgcacgaaggagctccaggttgaagcaaaccaggctggtatcaccgcggcccggttagaggcgattgaagaggagatgaaaaagcttcaacaaagccacactgaggctctggctaccatcaagcgcctccaagaagaggagaggatatcccgtgacgctcttacagtcgctgatggcgagttggggcgcctcaggctattggattctgaccatgagaaggataagactggtctccggcagcggatttccgatcttgaggaacagctcgagactgcgaagagatctgtgcctttgcacggcatgaacggcgatggtctatccaacggtggcgcagtcttgagcactgccccgggcttgatcaacctggtatcttcaaagaaacctaagcccaagagacgcagtgtcggtgccgagaggatcgagacggatcgcttcagtggtgcatacaaccctcggcctgtttcgatggcggtcacccctggatctatgatgtcccgtcaaaatgcagccatctctcctggtctagagtcggtcgagatggaactcgagaacctactttccgaagaggaagaattgaacgaggaagtcgccatgggtcttatccgcaacctgaagattccgctcccaacttcgacaccgcctccaactgaaaaggaagtcttgttcccagcatacttgattaaccttgttacgtcggagatgtggaacaacggatttgttaaggagtcggagcgattcttggccaacgttatgcagtctatccagcatgaagttatgcagcatgatggggacgacgcgatcaaccccggtgccttctggttatccaacgtgcacgaaatgctatcatttgtcttcctggccgaggattggtatgaagcacagaagaccgagaactacgagtatgaccgcctgttggagattgtcaagcatgaccttgagagcttggaattcaacatctatcacacttggatgaaggtcttgaagaaaaagctgtacaagatgatcgttccagccatcatcgagtctcaatcacttcccggctttgtcaccagtgaaacgaatcgtttccttgggaagcttctgccctccaacaataacccagcctacagcatggacaacctcctcagtctattgaacggtgtttacaaggcaatgaaggccttctaccttgaggacgccatcgtccttcagaccgtcacggagctcttgcgcttagttggtgtcactgctttcaacgatctcctcatgcgacgtaacttcctgtcatggaagcgtggtctgcaaatcaactacaacatcactcgtattgaggagtggtgtaagagtcatgatatgccggaggggacgttgaaactggagcatttgatggtaagatttcttgtttgatatttatttgggtattatactaacacctacatagcaagcgaccaagcttctgcagttgaagaaggctactctgaatgatattgagatcattcaagacatttgctggatgtaagtggacccaagtatcatctcccacgaattcacatgactaattttgtgcaggctgtctccaaaccaaatccagaaacttttgaaccagtacctggtggcagattacgaacagcccatcaacggcgagatcatgaaggccgtcgcttctcgcgtcacagagaagagcgatgtgctcctcctggctccggtagacatggaggacagtggcccgtacgagatcgccgagccgcgtgttatcactgccctggagacttatactccatcctggctacaaacaccgcggttgaaacgacttgctgagattgtgtccgcgcaagcgatggcacagcaagagaagctcgaatgggaccatgggatggttgaggaatagatctgtactgttgtatattagacttatggatttcctgtgagctacggattacgacttgcctggattatccatggcctttgcgatacagtgttgcgcgtgattttcgtttgtttcaattgcatatgacatcttggcttatagaccagaagaggttgctaagagaattcctgtaatgagttttctccttctaaaacatagacgacaatccaaatacaaaaaatggaatgcccgaagggtttattgtcccgagtagagcaattgatatgtaagttttttttattttttttatttcatgaattttgaacatatactatggattagttctcaccccctatcgtcggagtgctacaatgactaccccaagatggagaaaaagaaaataagaaacgaaaccaaagaaaggaaccttaagagatatatatctgagtagtccttagatcgggtcaggtgatcccaacatgtatgaatcccagcaccgtcaatatatgcaatcagcgatagcacagtggggcacactattatctgcgacttgcaacatccaacccataccatcacctaccaatctaaaatccatacacagtcaaaatggccatcaccacgctgaacttcatcaccggcaacaaaaacaagctcgccgaggtgcaggctatcctcggtaaggtcatcgaggtgaacaaccaggaggtcgatgtccccgagatccaaggcacaatcgaagaaatcgccaaagagaaggccagacgcgccgccgaagtggtaatttcttcctagacttttcatgctgaaattgcatttgcttacgagggaatagatcaatggacctgccttgaccgaagacactgccctggagttccatgcgctcaagggtcttcctgggccatacatgtatgtcttagctatattaaggcttacttactatgtgataatagtactgatgattgccagcaaatctttcatggagaatctgggccacgagggcttgaacaagatgctcgacggcttcgaggacagaactgccgaagctgtgtgtacctttgccttttgccagggccctggcgcagagccgattattttccagggaaggactgaggtgaggcaaatacagtcatttcaaatttgaatatatctaattgtgattgatgtacagggtactattgtgcggcccagaggcccagcaaaattcggtaagtgaacatccaactgaggtctgcagagaatcaaaatcaagatctgatatatgacaggctgggatgctatcttcgaatataatggcaagacatatgccgagatggacaaagacgaaaaggtaagaacggtcttgttttcccgtgaaaaaaagccatgtactaagagccctgcgaacagaacaaggtctcgcaccggtacaaggcgctggtgaagttgcagcactggctagccgaccaacagtaaatgggtatagaactcggcctgcagaagaccatagaagaatgtgaaacgaagatcaagaattgtatatggcctggcgcattccctcaatccgcattctgcgcatgcgattgcttccacgaatcgacccattgcgcgatccgctggcagttcgagtctacgtctgcatcctgctcgctgttcaactcgaccacgatctcttcgtcgaatgcctcccgcgcttcgtctgataggacgccgaagatttccgcgtcgacgttctcttctagctttttctcatggtagccccttggaataggttagtttgacggcgtagatatgttgcgaggttgattgtcataccgggaggaaagtcggtcgtaaagaacatctgtagtggggcagcggaggacaaccacgagatcgatccaggacttagggaagaggtcacaggcatgccagtcgatcaagtaaccgccatcaggaatctcatcttcgagggcatcgaggagctacatcgcgcatggattagcatgtgaattgttgagtcttgaaccaatggtgggaagaggagctttcagtttaagagaagagcttgtaggaaccattctcaccttatcctcgtcaacaacccaggtcttcaattcctcgtcgtattcatcgaagcatccacggtcctttgcgacctgattaatggataggtgcttcaagccgatctcttgcgcgagttgttcgcagtggacggtcttccccacgccgggggtgccggtgatgatcacatttggagaggtgcgcatagtttcttaaaggatagagatcttgaagtggaattgtagattgtagattgaaaatggtttccccagatgaaataattccatcggactaattttcctcccggctatcttatcgtggaggggtaaggtactgcatttggaatgtataaaagacatttatagaaacttgtaactatgtgttctttatttgactaacacgatacaaatgatatgcattgttaatggaatcgtttgattttatgcggcttcatgttccgggctggttgtacatagcctagtaccaattagcattagaacgatgagaattgaacaatcactcacttgagaagctcgaatatcttgtacttttgcagataaggcgttcctctgcgatatgctttaagtagacgagttggatctgagggcttgacaaacgtcccgagcaagcgctgcattgcaggagaagtcttgaacatgggatcgaataccagcagatttgcgctgccgttgtctcggatttcaaaacctacaattgtcatagaatgacctagctcaagttagattgaggtatataggtttgaaagttacagaaagttgtaccttgatgctggaagtatatcggagggagatcagtctgaacgatcttcgcatcgtcgtctggtgagcacgctgatcggaaatattcggcgacatcaatgtaaagagcctcataggcccgaacgttgcctgattctgacagactccgggcttcacatctagatatagggtcagcgggatcgaatcgaagcaggctagataactcacgggattcctagactcatgaaaagcgcttgtgcctaggtactcgttaggtatagcagataatcaatacggagaaaagacctacttcaggcgtaccaataaacttgcgcgtatttttgataccccctgtctcagctcttccagagctattgaaccccatatcccaggccgactcaatcatatcctgcaactcaaggatcgttggtcccttatttggaaagtgctcatagccaaagctacgagacttctgcagccaagaaaccagcatttgaatattgcgatagccacaaaacccgccttcccgacgcatcttgcagatatggcggactttggggctacagaataatgcccgctggacagatttgtcctgttcacacagccgagcaagaacaggaattaagttgtcggtctcattttctactgtctcgcgccgtgtgagtttgccatcggacgtgatttgggtttgctttgatgtgctgccgcccttctccagcattttccttagccatgagggcattttcttctcgtgggcatgcggacccaattccgagcgctggatagtgttagtacttatcttcagagatgcaaatctgggacgaatacccctaatctcttcgtcccgttggcattggttgcccttgggggactgtgaggccgtggtgtcttggcagtgtttactcgcgaggagtctcgttgcatcccacgcttgcctcctttgtgggagttcagcatgtcgagtgaatcttcatcatcaaagtacccatcgccatgtacgtctgtagttgggcgtgccggtgtgcccccagtatcatccatgccctccgcaacatgcagatccaggtgactggagagctcggcaatttctattgtctcgccacatccatgtggacagtcgacatatttgtctgcgccaccctggctcactggcagtgaagctgagttttggccagcaagatcctgcgggttatcctgtatggaactagctagccctgtttctggatggcagtattcgatgtgttgggacacaaaattagcatcggagtctgcgaaagtgcaaaaggggcatgaggcggtgttgttgtcggccatggaattttcgtccagtgctgacattggaggggaaattgttaggttgatgctgcagacaccaagatgagtagcaggtgtatatgtacaaaacgcagagagagaaaaagaatgccaaagttgattacacgaagagccagaagtatagacaaaggatttaatttgatgcctaaatggccagacagcccgttcgccgagacccactaggcggagttgtcagttcatgcggcgtacacatgcgcaacacacaacatacaacatacaatctggattatctttcattccatatattaatgaaccttggaagagatatcattattggtctcttgcttgtcctctttctgatccggttttcttcccagccctagccgaactggtccagctcgcctttgagaagtgcttcccttcatgacagccgtgggcattgaacttctttggcctttttctggcctcttttcataggagccatgtggtcatgaatatctgggattgacagatttcccatcattccacgatgccaaggaaggcgaacactctagagaccagactataaagtctctctctgcaagatattcagtcttcttttcgggcgacgaccaatggggctgctggagcctccggatggcacgaggaatcgtgaattgctcagggattctattctggaaggtgagaatccgaaattctccagtcacctacaggctccgcggtctcaaactcttcagcttggccattagcgcctctcgcttgctgttaaactgcccggagcgcagatttcctcaagctggaattccaacaaactgagtgcgtagctcaagctcctggatttgaatatggacctttggccacttggtgcacgtggcctccttcctatagtggccatgaggtatcgactagatctgagcaatatgctgatagctattctcaatgtagggaaagagattaagaaatcttactctccgcgtggctctctgggttcaaataaccagaatctgcccccaaggtagatgaagtaaataatcggaaaaaacggcaacgatctttgacaaatcgtgaatcatctaggtatggggctactttggctcttctctccataagatgtatggcaatgtccatacagatagctattgcggctattttctgtgactataaaattgtatacaggaggatcaacatgcccactcgatgtttctggcatgttccgaaaagtcgcaatcatttctatcgtgacgtgacggcttgggtcaccgcgcagcagaatcatcataatatcaacaaggacaactgaatctcaagcatggtccattcaagtatatcactgtactagtactagaaatcaattgtcgagtcctgatatatactccggaagaacattcaccccgccaagacccaatgaggtacatttcatatgaaaatggcgtgattggtggggcctccgacatcgttggttcctggccgcaacaggcaggcggtctctctctgcataactctatttccaattgagtcacaaaaaaaaaaatatgcaacccgaagtggctcctagggtctccgctttcgccggttccccctccaaaaccacttctcactcccttgcattacattgtacactgtctttacttattttgggtcgacactatggataccaccattcttaattcgaatttgccagtgaacacgcaggcccatagcaattgggtcgtgcagaaattcggcggcacgagtgtcggcaagtttgcgcgcaatatcattgagcaggtggtacagtatgacgcactttttcgatttcgacttgacggagactgacaattgtatagaccgagtctcgtgaacaacagagtcgccgtcgtatgttccgcgagaagcagttccacaaaagccgaaggcacaaccaaccggtgagtcactactccgcagccatatgacgcttgaggtattgagatactaacaccaatttcttccaaccaggctattgcgggcagcgcgggacgctgaaaatcctcgttcaaggcaatatctgacattggtggaggctgttcgtttggaacatgtacaagtcgcccaggaacaattgaaatcggtagaaataagggatcaagtgattgcggatattaccggagaatgcgaacgagtactcaagttcctggaggccgctcaaaccctgggagaaatcagtgcgcgctgtgtggacaaggtgatgagtaccggcgagaagctgagctgtctgctcatggccgcccaattacaagaccgcggggttgattcgcagtatgtggatcttgcagaagtcattgatttccccatcggtccccacggcttggaccaggacttttataataccctggcggcagctttcggcagcaaagtcgcggcctgcgggcatcgagtacctgtgatgactgggtactttggtaccatccccggtggtctgctcgatcagattggtcgtggatataccgatctctgtgccgcccttgtcgcggtcggaactcgcgcccaagagctgcaggtctggaaggaggtagatggtatctttaccgcggacccgcgtaaagtgccaacggctcatctgctcccgaccattacccccgccgaagccgccgaattgacgttttatggatccgaagttattcatccgttcaccatggagcaagtcattcgcgcacggatccctattcgcattaaaaacgtcatgaacccaaagaacgcaggcactattattttccccgactctgtggccgaactagagagaaccacacccggacatgatccacgtttgttccggacccggagtccaactctcgcgcatacaccgaaacgtccgaccgcagtcacaatcaagcatgatatcctggtgatcaacgtacattccaacaagcggtcgctctcgcatggtttctttgccggcattttctccgtattggacaagtggcgcctatccattgatttgatctcgaccagcgaggttcacgtgtccttggcccttcactcagagttgccccttttgaatggaaacggacgggatgagtatcagatcatcgacgaggatctccagggtgcattgaacgacctggagaagtacggaactgtggatatcatccccgagatggccattctcagtctggtaggcaagcaaatgaagaatatgattggggtcgcaggccgtatgttcaccactctcggggataacagcgtgaatatcgagatgatttcgcaaggtgagtaaataatgatccccactcccccgcccccctcgctctgcctttgtacccttgactggggctaactggatcttttctccccctcgcaggtgcaagtgaaatcaatatctcctgcgtcattgaagaacgagacgccgaccgcgccctgaatatcatccatacgagcatgttcaccttcctggactaagcgtcccacgtttgcgcatcgagcaaaaagtcattgttttaagatatcccttgggttttattgatagaaaaaagttatgcatccacccgaagtcgaagttccccgtgaatataggaggacacgacttttgttgggaaaaccaagcatgggctttctttttttgtgatgcatgggcttggagttttctgctttcattttccccggttctttttttttcgtctagaatagaagtcatgaagcgattgttccatgagggatgattttctctatattttgggatattcaatcacacacatcttatatatcagatttcttcttcttggtccctttccactgtagcctcctcctttctgcgccctgaatagaacggagtacaacgtactctgtaccccctgatccgacagtgaaaggaccatcggtgatgattctagctggagccaggcgtttaatgtgtctctgtcgcttcgcttgagtcggagtctgttagctctagggttactgtcgggttgtccacgaagccctgtcgcactggctaacctctttagttttacatctccttccttgtcacaacccttttcttccctgacagctcctgggtatttgtagcggggtggatacgacctatttggttaaaagcgaggtccattgagtccctgaattctccaatggcttggaatggacgagtgttagcatcatggcgaaagatccgaggaccctcataagaaggcaaacaggagagcctgggtaaagggattatggttcgtccagcaacccagtacagagtgagtaagtgcatgaaatctgttacaaggtgtctctgatatacaagcaagggcatagggaaatacactagggacctcctagattcgaacaatagaccccgttctagttccaattcattgctctgtcctcgtactccatactctgtgtaggtttggattattaggttccggcacctgcagacaagagtgcagcacatgcgttgtacgatgcagcctggaagattgattggccctcgacgcacccgagagcaattggccactagtcaagggcgttaggagatccatgacagcagataaacaaggggtgaaaggtagcgagcgtttcagagttacatcaacacttccacataccgggaggcccggaccaattggggtgccaatgctggattgacagtgtctcggtctagattggtggtgtgatactacgtgtacttgtagggctagatgtatgccggagtacggagtacactccgtatattctgtatattgtagacagcgtattgacaagagctaaagatagatatactgtacactatatgcttccaatatactactatacaacatatactattcaataatccaagcaataatgcaaacctgacatacttccgttcatcctcggtggatcagatcggcgctagaaaatgtgagcaagggaggggaccccctttggtaagatatgaattgataatacgaatgataccatcccgatatgccccacctcccatagtaaaacgcgtgacgcgtcgagataatgacaatacgtgactggtatcatcgcactatcgcactccatgatctccctctcctcctcctcccccccgcctttcttcttcgctgaaggaaaaattgaacatttctagaattctataataatgatttagtatcttccaagggtgaacaaggaaactgagagaaattctgaacgatatctcttacttgtcacagaaccccattctttcctctcaaggaaacccggcttactcttccaagtcttactctactcatttttcctgtacttccctgtattcttctcttctctatcctctctatcctctatcctcagcgtcagcagtccgtaccatatctggatattggttatctcatctcaaatcacacatctcatccattttcatcggttatcagtggcttgattcgtgccccggaagtgtgacgccttagcgccttgtggcccaacttgtttaagctgcatgacggcctgaggttattggcttcctcgatctacggagtaccattggtccaattggaattctctgcacagtctcgtcacacctagacacggctcgctcgttgtcgcaaactgggccgggggccttgttttcaacagtcgcgctctcccccaactctgtttacgcgtcatatggtccctctggtgattggtgatattgcaacttggtgccctatcatttaggttatgggatcgacgcgttctacgggcgcacactattcctcagtgctagccccatcagcccaggagatcatcagatcgcagccccgtcttcaaccctcaccgctaccactccaacccattcagaactcatcttcctatccgccttcgggtccccacaggccctcgccgacaaaaggagtccatccccagggctcgcactcgcgccacggaaaactcggtttcattcccatatctgctcctactccccccatgtttaccaccgattccccagccaaaaaagcgccgttccccatctactctacaacctctatgccacattctgccctcttcaccacattctccagcgtcaatcctgaatcatcaaaagaaaacctgtcagaagagccatccaatgacagtttcgcggacttcccagagccgtcgtatgaatctaaacttccaatgaagcgcacactcatggaggctgcacctctcaaggagcgatccaacaagaaacacaagcgtggcgaaacgccggctgcttatctacccgaaccccacgacatgccaccagtcgaggatgatggcaccaagcctccatacagctatgctaccttgattggaatgtcaattctgcgcgccaataaccggcgcctgacgctagcgcaaatttataagtggatctccgataccttcacatactacaagaacagcgaccccggttggcagaatagcatccgacacaatctcagtctcaacaaggcattcattaagcaagagcgacccaaggatgaccctggtaagggtaattactgggccattgagcccggcatggaagcccaatttcttaaagacaaacaagtgcgccgtgccacaatgtctagccttcctcttcctgctgctcctcagagagattctatacctcagtcgcaaaccgcaagcaccacaacatggatggtaccgccacagcccgcttatcacgcgccacatcatcacgtgcctgcccccagaccggctccagatgacttgtcttcagatgcaacattacctgcgtctgaccctgctcttcaggatgatgcagacgaagttgttcctgctcctccggtccgcgcaccacctcgttcctcccctccgcagaccattcggtcatctcctccaatcgctcctccccgattcgcccgtcagggtacccctccaacccccactcactctggccctacccccgcgcctcgcccgcgcaagcgcaagtcaatcactataaatgacagtggttatttctcgtcgttggagtcatccgctctcaggcctaacaaggctgggcatatcttgacatctgatttggatatcgagcctccacgcatcaagcgcggccgtgctgaggaagagatcgcgcgcatgcgcagctcatctcacgatatcagccctggtcaaccagtggtccgcaaaaaccccaaccccccgatcggttcttcgcctcttcgcagtcagtatgtgagcatgcagccgcctccattgacgcctatcatcaagttcaagaagcctgccaggccgccaccatctgtctctcccaataccaatctgcgaaaccatcgccggaagatccagcaaatggtcaactcgcctatcaaacatttgggcctttctgaagatgcccttccttggagcccggctttcaatcttcaggacgagacctatactcctcatgatcatttccatacctctttcgatgtttttgcggatcctggatcagcacaggtatcctatgggtctcccgagaagcgctcactcaaacgcccgcggaacgacagtggtaccactgttcttggggacatcacctcggtaaatatcaatacccgtttgggtatgccctcgttgtcgcgctccaagtccgcaattttccccgagtcgccatctaagcttccagacccgagccgctttggagacgctggccaggaagatttcttctcattccatctctttgatgagagcaatgacagccccggtgaagtcgatggtgttgatctcttgcagggcttccaaaagattggaggcgtgagcaaggacgacactctgaagcccagggcgcttcatcgaccacaattgggtcaccgccccaatacgactttgttttaaggcgctcttaagttcataatttgtactttctttttttgtttacaggtcgagatctctgcgagacgcaccttgttcgatttgccttttattgttgattcttgcatcattctcctcactgtccctttattgccctcctgcttttgtcgccccgcaacctttgtttcttgaattttggattgtacctggagttggttctcaacgatgtttccaaggtcctgtgggcgggtgttttatttgggagtttttgggctgcgctgatggagccggttctgacatttcctccactgagcccgggatggcctggttatgacattaatgacgatgctaagatgtacatgcaagcgatggtttttatgatttggatatcagggtcggggctatctttatgggaaactactggaatacgcattgaaggcgttcttgatataatgtatgtagttagcaattgaaagtcgttatttgtctgcttatcaaactgtttcatgagccatccaagccgagggtatatgattgacccgatgaatggatccaatagagtaattaaagaagaattaaacatagaaacagaaatgcatagtaccgaaacgcccaatccaatggatgcgtgtagtggacaacctcaatccaccactacctcccgaggtccccagccaaattgaagccctccagtcatcgaccaaccccagcctcctttttaatcgctgcttccacagccgttgcagccacagctgacacactgaatcgtctgatcctccttgagctgagccttgggcactcgacagatacacgtggaattgaaattagtctctttcgtttggacacagcgcagacaacacagctaggggaatcagttagtttagtccacttcctgaataaaagtccctcgaatcgcaaactactcaccttctcgtagccctgttttttccacttggcaatcaagttggcatcggcatacttgttcttgagcaggaaatcgtatagttcctttgagatcgcttctttctcgtagtaaagttcatagatgtatcgtgagcctaataagaggggtagcagcaagtcagcgaaaccgtacttaatttctcgatgtcgcggagaggagtaactcgtacgttgatgactgatctggaatatgggccagaggacctcatatttcttctttccttcatgcgatgcgttttccgcatccttcattttgttgctgaattccagcagtgtgtcttcgagatcgtcgaagccagcgggaggcggtttgcgattgcgggcagtgcgaatcggaggcatggcgggcgatatattacagatgagacgaggatgatgagacaaatgtgatgcggatattccaagcgatcgtatttcgatctaacagtgtgtcgacagggtgctttttttcctcttaaatgagaactttgaaacgaaggacgtaagttgctatcgatagggaaaactgcgcgtcatttttgtgccacaccccaccgcctttgattttgaattgcggacatccgtccagctaccgtccagctgttatttcccattgcccgtatcccattccacttcaattgctactcgcatctcatatacaataccgtcattatggaacaacagctcgatctcaccaagctcaccgacagcgacaagaaggagctcaaccaggtcctgaccaacgaggctcagaagtccaacattcagcagagtgagttgtccatctccatctttctatccggacgtataagagatctatacttgatgatttctataccctggattttgagtcgagtctagcgcttaatatattccacctggaatcaaacccatagctaatatcaatccctttctagctgtccaccacctgaacgaagtgtgctgggaaaagtgcatcaccagcaagatcacctccggcaccctcgataagtctgaggagtcatgcgcacagaactgcgttgaccggtggatggataccagtctggctatcctctcgaagctggacaacatgcgcggcggccccggccactaagcgtttacctgtgtgttctcggtttctgctatgatcgctgtctggatggatgcatgtctatggatgccaatcactcttatgaagattggttaggttggagcctgtcatgctctgtttttttgcttcgatggcggttggatgggtttttctttaggggtttatggatggatagacggattgtggaaccatcacttgtatactagagtgtcgatttatgaactaaaccatgttgtcttgtacaatatatgtcggatttgtggggatgttgtaagtagaaaagtgtatcatcgacgctaccatctccctagactataggaagagttgtgagaaaatgcaatatagactaggttacatatgttgaagaatcataacatgtggactgggtatgacttgcaaataatggaaccggtttaactgcaaaggtccaaccttgtaaaaagcaaatgtataagattggcaaagttggctcttggctcttgtctcgatgcactacaagaccattaggccatatacgctacacaaatctacaacagtatactacaacgtggtctggaacatgtcttagccattacaggaccgacaagtccggcgattcttttggaatcgtgcatttcactttcacaagttatgttctttttgatcattcagcccggctggtattttagcatcaccgcagtgtaaaacaaagttcgccaaaaccctaagaaatccttttcgagcattccccgcttagacaatggccaacttggtggcagcaatgtcaagagcatcgacatcgggggtaagacgggcgaaggccttcttggttccgtcagggctaaagattatatgttagttttgattcatatatatcaacagaaaggtagaacataccggataagagtgttgatcttgacggtgtcaacatcatacagcttcttaagagcctgcttaatctggcgcttgttggacttgacgttgacgatgaagacgagggtgttgttctcctcgatcttcttcatggcgctctcagtgttcaaggggtacagaacaatcttgttgaagtccagagcggggccgtggttgacggacacgcgggggtacttgggggaccgcgacagctggagagtcttggggcggtggaagctggccgaggtgcggaccttgcgggacttgtgaagctgttgccacaaccgcgttagcgataggctccaaaaggatttctttggtctgcttcatcttttgctacgtaccgaagcgcccttggcaaccgccttggcggcggcgttggccttgttcttgcctgtagagaatatttcgttagcgaagtggactaaaaaaaaattcccaaaagttcgtccgtggattgctatttgtgaatttgccggtgtggttgcagtaggtcgaggattctgaagcggagtcgcagatgctaagatcggtaggcatattgtgatgcagatttgttctgcgatatgccctggcgtctctggctctttgcgaggtgatctccaaatatcgaacttttttgaatccgaatatcttcctccacgtgcacacggcgaattcacaattggcaaggcggcgatcgcaataggaagagcgcatagttattggaacataccggtcttgttgtcggagggggccatggctgtcgtcggtcgctgtcgatgatggattatcgcagtgtcaaaagtcgaacggatttggagtggtcttcgcttagcgaaaaccctagtgctgtgtgtgggtcaggtgacctgcagcccgctgggtctggtatttttggtatttttcagtcacagtcgtacagtacggttacttttccgtccaatcagaattgacatcgtatttggctcattttcttgaacagcttttcttcacatgccagtgacctcctctgctttttgtatatttgtccctcaaagagatctgaagaaccaaagtattcttgatatcttaatctattatcctaattttctgactcctcgcgatcattaaagcatggctccccaaaaacgatccaagaggccgctgttgttgtcgcatagtcggcctcgcatcgtaaaatccaaggacgctgctctttcagccaaggctacccgcactctaatccgatctcatcatcggcttctcaaagtccgggctcaagctctagccgccggggacgaagcccgagtgagcagcatcgacgctcaaatccaagctaatggcggtctggaaagttatcagatcgccagtaagctaggccagtcgatggaccgcggtggagattcgagcaaagtgctcatcgactggatcaagccgcaactcaagcaatggaacaaagacattccaaagctccgggtccttgaagtcggagctttgagcaccaaaaacgcctgctctacgaacccggctttggatgtcacgcggatcgatttgaattcccaagagccggggattctcaagcaagatttcatggaacgaccgttgccctccagtgatgatgaacgtttcgacatgatcagtctgtcattggtgctcaactatgttcctgatgctacgggacgcggtgaaatgctcaagcgttgtgtcaagttcttgacgtcaaaatgccctattgaacttgttcccagtctctttctagtattgcctatcgcatgcgtggacaactcgcgctatctcaacgagggaagattaggggaaatcatggcttgcctgggcttccgtctaacgcaaagcaagcggacttcaaagctggtcttccatctctgggaacacactggtacctactcgcctaaggcttttaagaaggaagagttgaggtctggcaaaacaagaaacaatttcgccgttattctcaacaaaaagtgattatctgcgcgaaaaaaaaatgctattatactccgtgtaatgctgcaagtggaaactactttgcagagagcatgtcttgcggtaagaaggcgaagacagtacccacggctgccaatatcgaggagacgatgagcagaatccaatcaaggatgtactcgcctcgaccgatctcttttccaaagatcttgagatgaaatgcaagagggaagatgatacagatcgtgaagcacaagaatgaccccaagaaagccatgatacggtcgaaagccgggaagatgaccgccaaaacaacaatcatggccactataaaaacgcgcaccattgcccgtgcgatcctttgccgtgttcctgagctgttttcagcaagaacatggccccctccgagtccacaaagaacttccattgtagccacaagaggccgagcactatatacttgtcagcaatgtccgagaagtagtgaagacgttagactcacttcaagggcactttcgtgagggggatgattgagatgaaaactacaatgcaaacggatagggcctgtgggtaactggtgaccgtgagaatgttcgcagtgatttcgtcgcggacgccatcgccaaacattagccagccaatgatcgccattgagcagtccaaaataaactgtcaactcgttagaattgaacttcatcctgggacttgatgttcttactgtaaacagataggtcacccgaagactcttcccgtatttctgaggatgcctcatatctctgtagatgttagggaagacgccgtggccaccccaaggtgctttttaacaagttagcctcatgatcacgattcctttctgtccttcactcacacataatgagaccaaaactcagagggacggtagcccagttttcagggaagaggaatgtcttagctggctgccgcaaggagcccggtgcatctggcttaatgaagccatcgatgcaaatgagtatcacgactttcgaatgtcagttccatctatcagcacggctcggaagaggacttacttgatgtgcacgaaattatacccaatatgctggtaatactcaggaatcgtaggggcaggaagttgagcggaagaagcacaactccacacacgatcttccattggaggatgctcagtcctggcaccagagcatataaactgtctgaaaagagcacaaccagcgccacacatgctcctaaaagttccaagcagaagaggaaacttgtaaccaaacgggcatgttgcccgaaactgatataagcaagatcggcatacgtcacaacggtctggtcgacatccagacatttagccagcaccttggctgtataggaagtggtaactgccgagaagacaagaaataccaatcccaacccccacccggcatgcttcatcgccaacggaagactcaacaaaccgataccaatcaacacattgaccgagttgaagatggtctgcggaagggtagattgcccaacgatgatattcacctgggtgccatcttcctgttggacatgcttgacaagtaatgggcccgcatccaaatcttcagtcccatctacatgcacatggggatgctgctctcggtggaattgaatcgcattcctccgcgtggaatcactcatccgtgaggagatggtgccatacgatgtcgcaaaagctctatcaaacgacgaagcaagcagcccagcactaggtagtgccctcctgggagatccaggcgctcgtgagtctccatcatcctggtccgagtccgagtcctgaagcagaggccggtccacgtccgagtgccgaccccaggatgggaagtttcttggtacatatgcttggccagtggcaacggcaaattcatcgtccgattgcggttgcgcagagacaaacgacaaccgccgtgggaggacctctgggaaggccgcggctctctgccaagaccgcgcgaagttgtctatactgttgggaccccccgcttggcggactcgaattgagtaggacgacgacctgcgcaaagtaatgagcctaacggtctagctttttcaacaacagaaatcacatacctctgtctaccccccggctcccaatccgnnnnnnnnnnnnnnnnnnnnnnnnnnnnnnnnnnnnnnnnnnnnnnnnnnnnnnnnnnnnnnnnnnnnnnnnnnnnnnnnnnnnnnnnnnnnnnntctctcccccgccggtctccgaatcggcggcggtcggactaccatctagatggccatgatcgtgggagctcggtgtcgcaatcggtatcctccgtgagccatataccggttcactgtcgtgatcttgatctgttccagccctcgacatattttccggttaccaacacgatagtagtagagcagcgacccaagagatatatgaggattccaagttgggagttcccgaggtgaagtgcaggaaggaaagtcaagaccaaggaaaggaaaaactcccctcacttatcacatggagatagctcccagagaaagataagaggcgagagcgacctttcgatattgaaaagagcttagcgtcgaaagagcttccgctggtgtggggtgcggatcccagagatttgataagctcgagatttgtatgtgactaattgaatgggcagttggaatctgtagacaggatatatcatttctgtggttcctctgtatgaggcagtgatatcaggccatatggatgtcactttcctaggacctaacattgtgttttagaaaagtccagtatatacgaaacataagaaagataatgtattgcacatgtttcgcatactatgcaaagccagaagtggtatccatacggaggactccgtagatactcgcctattactctgtgacatgctatcatgcaatatatacctatatatagatagtactacacatgtacatagccgaaagtagcagaaggacatgtataaaagaacaatgtacctgtacctgatcacccggtcttaggccacaacccggcaagtaccaaatacgtcacgccctgggggtagccctggcttacctcagcgtgccagccgacccctcgaacaaacttgtccacggatgtatgtccaaccccacgaggaaatttgctgtcgcttctgaacgtcatcttcagtaaaggtatgtactctccgtggttgaatctatgagtattaagaagaaaacaccaatattcacttttcactcttttttttttcttttttttcgcacctactaactgatcttaggtgtaaaacaggcaagcctaaatctttgttcgccgactcccgcccactttactgaccaaatcttcaggcgtctgcagggcctccgataactcttcccctgatcaactgtcgcctcgccaagatgagcgctcctccgccgaacgaagctgagaagaatatcgagatctggaaggtcaagaagctgatcaagcgtcttgaagccgctcgtggaaatggaacctccatgatttcgctcattatccgtgcgctgccccaaccccgtcacttatggtcgccgctaatatgccaattcagcccccaaggatcaggttagcagagcagccaagatgttggctgaagagtatgtacgtgaaaccatatccctctgatctgtctgcgccgaccgtcgcctaatcgcacaatagggtaccgcctccaacattaaatctcgagtgaaccgactctccgtgctgtcggccattacgtctactcagcagcgtctgaagctctacaacaaggtccctcccaatggactggtcgtgtactgtggtgaaattatcacctcggaaggaaaggagcgcaagattaacatcgacttcgaacctttcaagcccatcaacacatccctctacctgtgtgacaacaagttccacaccgaggcattgagtgagcttctcgaggccgatcagaagttcggtttcattgtcatggacggtaacggtactttgttcggtactctcagtggcaacacccgtgagatccttcagcgtctcaccgttgatctgcccaagaagcacgtgagtgtcccgactgattgattacgatattcatccatactgatccatacagggccgtggtggtcaatctgcgctgcgtttctcgcgtctccgtgaggaaaagcgccacaactacgtgcgcaagatcgccgaattggctgttcagaactacatcaccaacgacaagcccaatgtcgccggtattgtgttggctggttccgccgatttcaagaacgatcttaaccagtccgacctgttcgatggtcgtctgcaatccaaggttatcaagattgtcgatgtttcctacggtggcgagaacggcttcaaccaggccatcgaattggctggcgagaccctgagcaacgtcaagttcgttcaggagaagaagcttatcaaccagtacttccaggagatcagccaagacaccggcaaggtctgctatggtatcgaagataccctcaaggcaatggagcttggtgcagccgaaatcttgatcgtccacgagaacttggaaatcactcgctgggtcatgaagaactccgcaggcgctcaggtgatcgtccacacgactaaggcccaggaagccaacaaggatatcttccaagacaaggaaaccggaatggatatggaggttgtcgagtcaggctctttcctcgaatggcttgccgaggcctacaaggactttggtgccaacctggagttcgtgtctgatcgatccggcgaaggaaaccagttcgtcaagggtttcggtggtatcggtgccattctccgatacaaggtcaactttgaacagcttgccgatcacagcgacgatgacgagttctacgatggtatgttcttccagttttccgttttctatgtgtatgttaacaagaacctctacagattgacggtattgccccctcgcagagagcgaggatgaacggccagaagctcccgcggcgagtcttttgacggctcgccctgtggatcatacaggcggctcccgcgatggaactaaggcatccgtgaaggataaccaaaaaaggcctggtccacgccccgtgaagctgctcagaggtgagacatccagctaggctatcacccaggtttagctctaatgtttgtgtacagtgtcgtccaagctccaagatacgcacactgagctcgcctcagtgtctgagatgaagaagaggtttaaattgcaatttgaaaggttgggtgcagtaatctgcaacgtttggtcgtccaccgctgcttgcactgcttactctatgtaagccggacggcgttggattgttttatgtccccgccagttctgtcgtttcatctctgaatggcattttctggtacttcgctcgttatttgctcgttattaaaaaaaaagcacccgataggtgatagaaggtgctatttattcttattaagttttctgttttatcttgcggtatatgtacactttgtccatatcatcgacagtgcgtacatttttgtttcatttattcgtatagtaaatcggatatctgcaacatatgacataacgttctcagtgcgcttgcaaaatcgtcaatgccttgctctcaagcaaaagaccgatcagtcagtcaagcattgcttgaccttagctgatctttccaggtccccaaatccttacatgtctcagtgacttgacgcaaatcatcgagggctttgtggactgcctctttgttcaaatccgagggtgtccatccacactcaacgaaaaagatatactgccaagacttctttagactcggcctcgtgttaatgctcgtaagattcaagccatgagccttaaagatcaacagcgcatttgccaatgcaccgggagatgaatgatcaatcgtgaaagtaatcaaagtcttgtgcgtggcttcaagggcaggctcgccttccaccgtaggcgggttcggcagcccgagctcggcctgggcagtccgctcatcgcgcacatttctgaagatcagaaaacgggtcgtattgtccgctctgtcctcgatgttttccacgagaatgtccgtcccgtgttgttctgccgcaaagcgattggcaatggcagcgcctcgctccgttgtctccttggagacgatatccgctgccttggatgtggatgtgacgtcctgtctctcgacacccttgaaatatttggtcaggaaactttcgcactggccccatgcctgcgagtgtgtgtatagcttggttatcgagccgtcgtagtctgcccaaccaccggggtatgtgcccttgcgcaccattaggcagtggtgcactgtcaagtaatattctccgcagactttcacgtctttatataaaccattccggtctgccaggaggtccaatgtctgcattacagagccattggttgagttctcgcacggaatcacggcatagtcaacttctttcttttggagagcggcgaaggcatctgggaatgagacttcaggttgtagatcggcgggtaggttgcaaaaagactctgcggcagcctatagcaaggatcaatcatcaagctaagttgcatttgcagggatatgggataaatttgtacctggtgcgaaaaagaccctagcggacctaggaaggcgactttcaggcgagccattgtgattgtggtatggatgggtttctccgtgcttattgagctggacctattgaaatcaaatcaaatcaatattcggcttgtcatctcatcgacaggcgacatcggatctgcgagcggtgtggctgaatcccgcaatgagcgacagacaaacaaatcaaacgcgggatgaatctattgcttcaagtgaacttgcgattatcaaatcgcccaattcagcactggagtcggtgtctttgctcatgaagacaaatccactccggcccttggtctcttttcgaggcgggcgtcatgcatatcgagcttactcctcgctctccgagcggttgcatcatgaactgaccacaaggaaacttccgttgacttacgattatctgcacccccaaccctcgcatctcctgaaccttacactccgagatcttcttccacaatcccagggctcctcggattatgcgactttaccgtcattacagaatccgtccccactcccggccggtcatcacttaatctacttcccgccgcaggtgaccttgtcccaattactcccggactgcacagatacgctacacacgccgggcgaaccatttaatcggcgcctttgggcaggtggaaatctaagattccctgtgcgcagtccgcctctggatggcagccgcgcagtctgcatagaatccattcgcaatgtgacagtgaaaggccgcgagggggacgagaaagtgattgtcaccatcgagcgtcgcgtcggcaatgttcccgaacaagaaaccgccgaccagacctgggaccgggtatggaaagagaacgaagacgatgcgggggaatcgtcagtcattgagaaccgggacctcattttcatgcgcctaaagaccagcgctcaaatcgaagccgataaagcgcaattcggaaagcctgtcaggactgtgaaacgtgaggatatactttccaacccttgactatgatgtcaaatgtactaatgattctggcgcaatgaagctccttccgatgcgacattccgccatgccctcatacctactaaggcactgctattccgattctccgcgctgactttcaatgctcattctatccaccttgacaagggctatactcagaaccaggagggatacccaaatcttttggtgcacggtccgttgacactcacgcttatgctgagtgtgcttcagcaacagctgagtagattgaatctctgcatcagtacctttgaatataagaatatagcgcctctttttgttgaacaggagctggtgatctgtggcaagcctaaaaatgacactggggcttgggatgtatggattgaaggtccagatggaggattggctgttcggggtactgcacggacgaggtcggaatgatacccaattatattccacaattatacattattcaatgcgacagcacatccgaacgatatctttccgggaaatatcttgaaataatagtaacagctaggagtgcgaagctgtcgaagcagatagaacaatcaatccgtcgatggatacaaggtagttacgtaaacaacggatatcggagaaactcccccgaagttagatttgcacacctttttccttccacctgtccttctctttctttcttcaaccacacagtaatttggctattttgtgatcggctgtaatgatctaagtcgtgatcaattaaccatcaagcatcttcttctttctcaagatggatgccttctgggcagctcccccggtcattaggtatgcagattctattcgctgatcccaagctctcatcactgacttgccattcaggacccttactgccttgactgtggttcaatccgctttgatgtatagcggcttagtgagcttctattgggcgctattcgtgccgagcctgatattctcatggcgtccgcagatctttcggctggtcaccccatttctactaaccggacccagattaagtttcatatttgatctaattctcagtatgatgcctcggtatcacattgacttgacctgatcaaattgctaatgtacggacagtgtaccgctatggcagcgctgcggagaggagcatggcccccggagagttcttcatttatctcctatttgtagctttcagcatcatggtgagtgattcggtagaatctgctttttttcatctgcgttcgcgttcatatccaatccctcgctataactgcccgcccagcttcaaaatctagctgaattcggttcctgaaggcgagggaaagcacccctgcatctgtgcaacaccatcataattcgcaaaattcaggtgttgtgcaggtgtgggcatggtgggattgccttcgagctcactggcgtgatttcatatcgcgtcggtatcggaggtgccctacatttctatatacatcatctatcatttccaataccatctacatcctatttactcgtcatcctggtagtccaacaatgtcttccaaatttgctaactttccaaagctcactgcaggtggttatctgggacagcctatcctcctgtcacgtaagcctgccgtaccttgtttaattctcaggctgacactgacttgaactcagccttgatcatggcttttgtctacaccttctcccagacgaaccgaggaacaaagacgaggttctgggtcatcgacatcccggtggtactcctgccgtatgcaatgattgtcgtcggcatggtgatgaacggatgggagcacgtgctgtcagatctcacaggaattgtcgctgcccatacttatgatttcctcacacgcatctacccgactttcgggggtggaagaaacttcatccctgtgccccgcttcgtggagagatacttcaccgaccacgaccccaacagcggataccgaccgtatggaacggcgagccgcgcaccaaggccggctgagccctcgtcggcatcaggatcatcctggagcagctggacctcttcgagttcttggaacggcagaggcgctggccgaagactaggttagatcgagagccgtacatgctctgcgccgttgtcgacctgcatgggagatactttgccctggcagacgtttcaatttttattgtgcccatatggacttgagatagatagtgataatcaataagcacacggttttgggcattgtttgcccacaaaaacagatttattgaactccagtagttaatcgtctttgagtatatctatattgaccaattggcttgttttctcaattaatctatgcgatcagcaaaacctctcctaaattggaagtccttggaatcggaggcgtaaaaagtcgagaactccaggtcacgtggtgccttctccaggcgctaaactgctttgggtactggagctgccgcactcgcaaaatttccttcgacaaattttcggggttttcaccgcgcatccttcaacgacaaccaacaaaatggcagtcgtcaagacctcggagatggactacgccatcaagcctgaagcgtccgttccttccgttgatacatcggattggccgcttctgcttaagaactatgagaagcgtacgcttgtccttaaaactccacgcttgaccagccgacattgacttcttttgtagtgctcgttcggaccggtcacttcactcctatccctgctggctcctctcccctgagccgtgacttgaagtcatacatcagctccggtgtcatcaaccttgacaagccgtcgaacccttccagtcatgaagtcgtggcttggatgaagcggatcctcaggtaaataaaagtccatcagaacccctcaatggtttcgcacttttgctgaccacattcccctctgtagagccgagaagactggtcacagtggtacccttgatcccaaggtcaccggttgtttgatcgtctgcattgaccgtgccactcgcctggtcaagtcccagcagggtgccggtaaggagtatgtctgtgtgattcgtctccacgacaagattcccggtggcgaagcccaattcgtccgcgctctggagaccttgactggtgcgctcttccagcgtccccctctgatctccgctgtcaagcgccagctccgtatccgtactatccacgagagcaagaactacgagttcgacaatgagcgccacctcggtgtcttctgggtcagctgtgaggctggtacctacatccgtaccctctgtgtccacctgggtcttctcctcggtgtcggtgcccacatgcaggaacttcgccgtgttcgctctggagctatgggtgagggccctggtatggtcactctgcacgatgttatggacgcccagtgggtctacgacaacaaccgcgacgagtcttacctccgcaaggtcatcagccccctagagactttgcttaccggctacaagcgtattgtcgttaaggacagcgctgtcaacgccgtctgctacggtgctaagctcatgattcctggtcttctccgctacggtatgtaaatttcttgcccctgagtttttcttgaccattactaattctttcttcagaggccggtattgagtgccacgaggaggttgtcctcatgaccaccaagggtgaggctatcgccattggtatcgctcagatgtccactgtcgagctcaccacctgcgaccacggcgttgttgccaaggtcaaacgttgcatcatggagcgtgacctttacccccgccgctggggcttgggacccactgcccttgagaagaagaagatgaagaccgctggaactctcgatgtaagtggctaagcagccttctctttcgtccaatgtactaacttgctctcagaaattcggccgcaccaacgaggccacacccgcccaatggaagagcgagtacaaggacttcaaccttcccatcactggaacctccgctgttgcacccgccgctgagactaagaccgaggccgaacccactaaggcggagtcccccgagcccgtgaaggaggaagtcgaagacaagaagcgcaagcgcgacggcgagacagccgaggagaaggccgagcgcaagaagaagaagaaggagaagaaggaaaagaaggagcgtcggaagtccaagcaggatgatagcgatgacagcgattagatgcactccaggaaggccgtcaggtccttttcctgtaccatattttgctatttccggagtcttgggtcaaaagggaaatttgttctattccagagtttcatattgaaggctgcctatgtgttgaatctaccattcttaaaaatccgagtaacgttagcaaatgaatcacgtacatgtagcgcttgcttgttatgttatccgaagctattggctgtaatatatatttagttgtatgtatggagtaccggagtgcaaccattttatactttcgttattccaaagcctccttggtactccttagtctcttatattcatcccatttcaatcaactttaatagaatcaaagaccgcagaagtgtagtataaccgcaaatggaggcggtcaatgctttgtcctcgatgtggatctcgtgactggacatcatctccgcatttctttcccctccactttccacttcatgtctaaactcaatcctcaactttatctctcgaacttggatctgagatcaaaacaaacccaagcatcactatggcagcagagctgacatccaccaagctcaacccagagagtcacatcatcctggtaagtattactccgcacctccatgataaagcgggacctaaccggctgcttccacaggaccaaccactccttcgactacctcttgaactggcccgcaggaattttaaaaccgtacaacgagccgtcgagcgagagaaagaatatgtcatccccgcaatcaaagaggccgccgccgcctcactctccaatactcaaacgcccgaacagaccctagctgcactcgacgcaatgatatccagaatgcaaagtctcaaacggaagatggaaggcttgcaggaggaagagaagaaaatacacagccaatctcgcaagcgtattcagcacctggagaccctacataaaattccgagcctagccgatgtcaaatacgaccagtggtcaagggtacggctggaccgtttactcgttgaccacatgctacgctcaggttactcagaaagtgcgaagcagatggcccaggataggggggtagaggatctcgtggacctaggtgtattcacacaagctaaacggattgtggatagtttgcgacgtggagaaaccaaggaagcattgcaatggtgtggagagaacaaggctgcgctgaagaaaagcccggtaagttggaattgccttttcctgtcttgaagccgtctgctaacataattcttatgaagcaaaatcttgaatttgaactccggctgcagcaatacatcgagatggtcaggacacaagacaagtctaagaggattgaggcaataatccatgcaaagaaatacctcataccgaactatcaggctcagaattccgatattatgcgcgctgcaggattactggttttcacgcaggacacaagagccgagccttacaaagtaagccaaacattcatatttaattagtagtgttctcattaatggattacagtctctctttgcgcgggaacgctggaagttcctcgcggaccttttcatcgagacccaccatgagctgctttcattgccggcacaacctctattgcatattgccctttccgcaggactttcagctctgaagactcctctgtgccactcggcatatacatcgtccagctcaaactcacagtcaacatcgacatctgtatgtcctatctgctcaactgaactgaacgagcttgcacgcaacatgccatacgcccaccactcaaagagttatgtggaaagcgacccgatagttctgcccaacggccgagtctatgggaagcaaaggctgatagagatgagccgtaacatgggaacagtgaaaccaggcgacgtcaaagacccaacaacaggacaggtcttccacgagggtgagatgaagaaagtgtacattatgtgattacaatatgtgaactcggacagacgtctaccaaggatgaaacgagatactacaacttacttacatatattttcttatagttttttttattgatttgaaacatgatattacccctagttactcgctatcactagaatcatcatcgcggcttctcttcttccctcccttcttgaccggctccttctgcttcacttcaaagacatacatccgagcctcccgatcctctcccttccatccgccgcgctccccatcctttccttcaatatgccctaccgttctcgcatgagaatagccctcataagaagtccaaggaaaccggaaactagtcacaacaaccagccccgcatgcctcgccaaatccctaatattccaaagcgtatatggctcaccctcgaacagagtaacaaggatctgaccaggcccagtccggaatcccttcccggtagtatcatcgtcttttcctagctcctggccctctcctccttcctcatcctcatcctcatcttcttcttcactctcctctccatctgcatacacccactcatcatcatcagcatccataagcggcggcggcttcgaaacaagcggtatacacgccttgaagaatgcaaccagcagctcctgattcgaacgaacctgtcggttcacatccgtagaaagcccacccacatgcgggaaattgaagcagatcacatcccacgccccaccgggctggtacggtggtcctgctggctcgtctttctggtaccaggctggtctcttgcgctcgcggcgtgcgaatcctgtgcggatttccttgccgccgcctgccggagcgccgagtttgcgcgcgtccaccgagaagacgactttgggggtttgctggttgggattggcactggggttggggttggttgagtcctggtcttcggatttgctttcttctggctggttttcggtctcgttgcttgctagttttgactttgctgatgcgctcaggatatctgagacgttctgaggagcttgcgggtacttgttgtatagcacttctttggaatcgtagcatgtggcgcataggttgcggcacttgtattgttttgcaagagaacgggcgaatgagaagtcacctggttgctgttagaatttatgtttccaggtgtaatagataaatcggtgttgaagcgtgttacatgatcttgttcttatacaggaatgcatattggttccaatctcgtatatcacagtaaaagtgctctgggtatagactccatgggaaaatatacatatatagcttaattgcaaccaaattcttgcatagaatgaagaacgcagcgcaatcatgtcaactaaatcagaagaaaagctcaccttcaccaataaggaggattcgatccttccttaaaaacggcacgataggtctctggttcgcctgcatggaggctttcttaggtgggttggcattaccacttccctgcttttgcccattgccatgctgctgtcccttggcagggttggaagacgggccagatggtttgcctggtccgcgagcgcgcggcggaggggcatttttgactttcttgttattgcgaggcatgactgaaggcgaagaaaaaggagttcactttcaaaaaggaagttatatgaacttgtatgaaacaaatacggagctgtcacctgtgtctgcgactggaagatgatgcagaagaaaagcgccccggataatcaaatatccgaagtatataacgacttcaatcttctaccgccctttggtttgattttgttattttagtccaacccaaacttgaaaatttggtttgcattaattctctctagacataccactggaaataactcaaggtagaagtacatatcacgtgatatatatagttggtacctaagacatgcagtatatagagggctgtcacgtgagtcaatgtagcagggcagaacgcgactccctagtaacgtcactaccaaatttttcgacctcagatcggaccgaggatctaatttttgtaccttttgggtaatatgaatgtatggcattctaattgttagatatattcgaatgatacaaaaggaagatatggtcaagtgaagctaaacgactcgtgatatcaacctcatgaacagacctatccagcaacttccaagtccaagatcatggaacatagaagaaaataaccggaggaataagtcatattatttatagaaaaacgttctattagaaaaaacaaacagagcacggcatagctatatacattgaacaagacaggcaaggatggatgctatgaccgcatgtcaaaacaaggttagaattaaatcatactgtagaccaagagcagggggtcaggggaaaccgcaaaaaggagtctgttttccttcggggaggagagaataacagaaaagaagagagaaaaaggaatcaaacaccaacaccgaccaaagtgatcgcaggatttcccaatcagaccagaaaacacccttgaatttggctgcaatgaaacgtgaatcataatgtcacatgcaaaggagcaccgtggacgcggttgactttttgtatacacactgaccagtcagatgcatattgccattccaagccttaggagcgcagggagtctctcatgctctggctgctggcactgactggagtggggagaacaccggtacggggcttagagttttgcttgatcttggccacggcgtagacaataccgctgacgaagccaacagcgatggcggaaacactggggaaggtgactggcgcatcgaagaagacgagaccggacacggcgataggcagcttgttgagagcgccaaccatagagtatgtggtggaggaggtagtgcggacacaccatgcggatgtgtaagagatgaagacagaggaagcaccggacagaaccatggcgaagaagataccctcacggttggcctcggggaagttgcgggcgaggttggcggatgaccagtcctcgacaagcagggtaaggacgatcaagacggggatagaaaggaggttgttgtagaacatggctggagagaagatcatgttagcaaacaattgaaacaagcgtagaagaatcacatactgtcgaaatccttgaagttggtcaacttgatgcgcttgcgcatgcccaggacataggaagaggtgcacaggcagttgatcaacatccagacgtatccggcgttcagggtggagaccttgctagaggtgtcaccggtgctctccacggcatgcttgatatcagcccaggcggcaatgagcgaactgacaaccatcagaccgaaggagaacagagtaaggttagtgaccgagccaccaaaccagagaacctctccataggcaatcaggataatggtcaagttcttgaagatggtgtagactgggattgagaggaactgaagggccttggaaccagtgtagatcatgccgatcagcaggagcgtaatcgggaaccctaatatggaatcgtgtcagctgggatatctcttagcttgcgataatcggagtccatacactttttggcctcatcggagttgaaatcacggtaggtgataagacccatagacttgcatgtttgaattgccgcaatgcagaccaaagactgttgatattagcaattcgcctcggatcaagactgctagatccaatccaccacatacctggatacagagcaagaggaagttcagattgaagtccaagcccgacagaacatacttgttcatcacggtcatcataattgacgaaccacagtatgccaaaacgggaaaagcggggttgttggttatggcgggattggcgcgcggcgagggagtcggcggcggcgcagcctcgaactccttcccttgatcgatcttgttcatgtcgacggtgtagtcgtcggatttcttgccttcagccatgttgagtgaatggtcgcaaataggggggcggggaattgtgttatcggctgtttcttgaaagaggaaggaactgaaatgacagatagcacccagaatatatctaggggagtcgaggaacaaaaggagttgttcgaggaggtgaccaaagaaaaaaaggccaaaggaggttcagaattcgcggccggaaacagacacgtccttacctaagcaaggcgttaggggctgctgactcaggattttatttatagaccgataactagatgtactattgcattagaaccatacggagtacgagtacattggtagtctattgatactgatagttagggattgaaaacgctcaattatgtcaattacatgatatacgatctaactacgtagttggcagttgtacctttggacttacatattatggctacgtgcataaagtataacgtcttaaagaatatacaaaaattggtccactaactaaaggacaagaattaatgaaatacgtacctcatcccaatcgcagactataaaagccccgagaacaaatttataaaactgttcacgcgtccgtaccgagcccatataccagtggagctgctcccgaccttccaacctcaactctcctaaccacacactcccctaaaaatcccaatccataccttcacattgggacattgggctcaaaagccaaaccaaacagaagagtcgccccaaacccaccaaaacaacaaaaaaacaaccaaatccccaaccaccccccgcactttcccccaaaatgcccgactcagacgacgaagccctcttcgccgccctcgaaaacgaagatgacaccctctaccgcgaccaacgcatccaccaactaaacgccgagctcgcagccacaaaaaacaaccactccgcacgggcaacaagcggcaacacaggcctcatccaaaacgaagtctacccaacactctcgtcggaccagtccgtgctagacttcacgacgcgtacgagcaggtgtctggtgcactttgcgcaccctgattttgcgcggtgcgcagttatggatatgaggcttggcgagctggcgaatgtgcactacgaggtttcgtttgcgcgggtggatgtgcgtaacacgccgtttattgcgcagaaactggggatcaaggtgttgccttgtgttattgggttcaaggatggagttggggtcgatcggattgttgggtttgagggacttgatgctaggggctttgatggggttgaagggtttgatgtgaaagtcttggagaagaggttggtctttaagggcattctgttggcggcgaagattgggggtggggaggaggacgaggatgtgagggaggaggaggatagtgatgacggtgctggtgggagaggatttgggaggaagaaggggagacgtgggattcgggactctaaccccaatgtgagaaaccgaggtgacgacgacgatgacgactgggattagtagtcgattaaggatcttgtttcttgaaggttatacccggatattggaatgttcattcatgatttctgtatattaatggattgatgacccagatttatgttcatagttggatgtttagtagcatacccatgccatatatccatataccgagacttatacaagctgtaaagtaaccacctggcaccttgaaaacctcaactggcactatgtgtacagcatatgccacgggagtaagtcttgggcaacttgagattaagattgaataatcaaagtaaatgggattggagcgagacacgaaaggccaaggcagactgtcatcatagaattacaggcaaaaaaatatcaaagaccgtaaacacagagccatctcgacggcaaaggaaaccaaaacgaaaagaaaaaagcagaaatggagcaaaacagcaccctagagttacaacaaatgccgtggaaccgaggccagaagaagaacaggggggaattctatacatagaagcagaagtagaaacagacgcaaagcagaacgttgtcgcgcatccataagttgcacattgaatgccgggtgcccttgaaaaaccgagactcgagagaagccggaactggccggactcaaaaagcaaggcttattctaaatagccacgttcttcatttcgccaaggatctccgactcaatggcggttgaggactccgcggagtcggttttctcggattccttaagttctttgggcttggagaacccttcgttctccttattggagatttgcggggttacaatctccatgagatcttcagtctgaggttctttgttttccttggtgtcttcggagattgtgggtcctgcagtgacaacgggacttgtggtctcctcagtcacgcgtgcaagagggctcgacacgccgaatggcgtcttggggctctgggaatttccacccttggagaaacggtgcggcgagcggccgcgttcttcggcgcgcgtggggctgccgtagggggactcgcgactgctggaccgattgcctgaagcgctcacacccagaccattgggtacggggcccttccggcgaggtacacggcggccatacttctgatcagtcctccagcgcaagatatccaggtatgggggctccacattttgggtcttgaattgcttcaacttcagctcattcgtctcctcgtcaacaatgacgtcgccgctgcacagatcgtcggcgagagtcgcgaggaagctagaccacgaccgggcaaccacgtatttgcagtcgtaatcccggccgaaaataatcacctggccccattttccagcggggccgggtgccagatcaatggccaggttgttgccgccccaatcacgggcgaggggaatccaagcgggatgtgagtaggccttctgaactgcaccaggaggctgggagtcctgacggtcgagcagttctgattgccacattgtggatgagggttgctgagacggaccggccgcggaggagcttgctgcagagctgggtgcgggtggtatagttgcgttgctgagatattcgtcgttgacctttctccagttccgccattcctgaacgatctcctcgcagtcgagtagcatagcgctgaagatgacaccggtgggtaggccgccacgttcttgaccgtcatggaccattaacgattcccgcacctccaatggcagactgcagtcgagttcgtgctccaattcgttaatatcgttttgggtacatccttcaccgagctgatcaaggagttcctcataattgtgttctaaccagcgctcgatcttcctccaggagtgagcgaccggtggcggcggtggtgctccgtcgtggaaactttgcatctgaatctccggtgcaccctcaccttggtcgttcgatcgtctcttctgagatgcgacggatctcatccctggtgagtagggatgggtgggggagcccaagtcgtcggagccattccattcggatgcttgtgcccttgcagatccttttgtgggctcgtcatcataggggttggagagatctgggcgagactcgattgcgctagttgcgacagatgtgagcggctcatggcgactttggctgagagggacgtgtcccccggtacggtagggggagtcgtgggaggcatgccggtcataggaggtcatggtatgccaaaaggaccgccatgtcgagttcaacctgcatcacgtcagtaaacataaaccttcgaagggtgtctagagtctagacatccaaaggtagactaacatattcgccatggtgtcacagtagggaaaaaaaacagggcgcaggggggttaaaaccggtatttaggtcgcgaaagcggtcattggagacgggaagaacgtgtcccgacgcgggaatgatcaatagagaattcaaacttcaaagagagaacgctgagagaagggagaaaggagttgttgaaaaagtgaagatgtgaagatgtggtaggggcaagggaagtccagaatcctgaattaggtaaggaaggagaaaaggtggaggggggaagatatggagattatttatgtgtctgtttttatttttcttggaaacacaagggttttgaaaaaagccttggaataatatataggatctcctttcaatctcaatatacttactgagtcctttgcttcagttgttatgatatgactctattccaccaaacccctggccgcatccagcgaagcctcgacgctgtggtatgtagatccttttgatatgatgtcgataatccatcataagcttttgaatgcaacaataatggggtatcttgccaagtatgtgtgttttagtactttgctgcattcagtcttcaatacatgccttccaggctggatacaattacacgtgggcagtctgtatctgaatgccattgtccgagccgccaaagcaatgaaaattagagatccccaactcccgtctgatatgtgtgggcaaggttgggccaaagaagcggagtacatatacagaaataggaacacagaataggagagtttggagtgccgagttcgggttgccttgactgccccctaagaaaccacggaatacagccgagggcgaaattgatataaaattagtcgcggctgggtggatctcggggaaaacaaatgtggctgacgaataggagtcgttagggttgacaatagggggaagagtccacgtttcaaaaaaaaaaaagaactattatatacgaatgtacaatgtacaatataggatacattaacatattaagcctgcgaaactattcagtgataccacgatgtagatccctcttattgaattaaaatatccataggaagaaccctgggggatattaggatccgcactgggttcaacttctcataggctagactccacatcggaattaggaaagctgccaattttgattcgtttcaaacgatgtggctagttcagggcttggtgcaatcttggtcttggcattcaggcacatagtatgttgtagtcgttgaccctttgttattcccttagcttgatacggagtacggagtatatctttatacccgatgatactatccctcctatactcctatacctccgaatatgagtagaggctcttcggccggtggaacatcgaccagtagcttagggaacaccggtcaacacttataccaagttctcatcttcacaacaaccagtatttagagccgacgccaatatcatcgtgagccctgagtgagcatctcattcatagtcacgatactagtgcatgttttccattagcctctggatttgccaatttttctgttcctatcccccaactcgcctttcatcttcctagcccctaacccccacaccagccgggcttggtttacccttttgatcaaatcacctctctttggagagcgttgtcttctcgtgcaaccttccccgagctcggacttacctggctatacttcttcagcatacacacacaccttggaaaagtccgatatgattacactcctcgtgtcagttggatacttcacgacacaatgtctgggtcaagccgtaagctcatattattgacttataagttccaaatctaattgtaccgaataacagtcattgagccaaatcgatgggaggagattgtcgaccttccccgacgcctgttcgaatggtgtgcttggccaaaagacactcaatccgaccccgtatcggcagattggctgatggggctctggatcaaaattccagctgggtcatttcttacggcgagaatactttggaagcatgtacccgtggaagatctcgtagaccagtctgagggtgaaatgctcgaactcccaccagacgtgagaaaaaaggccatggattgctgtctgcagttccgtcagttcgtgacatactgtaccgacatcgaggattatggtggaactaagcccaaggattgggattgggataggttcgatcttggtccattcttaaccattcgcagcctccaattcacaattcgccgggataaagagagactaaacgagtctgacgatactccttcactaggagccataaaccacctgtaaacgcttcggacacgcgaaaagatgaagagatgcgggaagcccaagacgtgaccagcgaccctatgtctactgatttaatgtgagagatatattggagattgaagaagctaagctatgaaattaagaaatttgacaagttggctacttgagaaagctaaaagttagacgctgagttctgataggaagaaccatgatccattcaatccagcaagagggtatttataccctcgaggctaataagcaaactgctcagtctgcaagcaaacaagtttgaacaatcaagcattaatgggatgatccaacaagttttgacgatcttcaagcccctttttgctagtatctccttgtacaactggccacgcccattttaacattctatcaatcgtgtcatagtatttaggcaagtcgatgatgtcaaagtagtttttctcaggtgggggctcgactgcgaatggtgtaaaatccacgaccccggtaaactgaaccctcaacctaccatcaaaataagcatagaggaggcggcaaggcccatacaaatcgaactgttttccgcctagaagaggccaatctctactatacggccgtaacaggtatacacaatacccaatatatagatctattgagacttcctcatctcggaatacgacagtatctccttcgtcagatagggtatccctaggacatagacgtaattaacttacgtgctgcgttagtaggtatcacgactccatcggtataaagtaacatctcctcagccacgtgcccagtcatattcagtaataaagaacgagaggctgtcatagcggaatcgcaagaatggaatgagtctgaacagctgctgtcccagataagagaatacctcggtatagacctggaaggtgggaccgagctagataatgtggagagagcggtggagggcaatcgacaatttcgtatggaaatgctacggcaagcagaagtggacgagcgggagatttgttggcgaaactggccgtataaggatgatgaagatgtgaagatgacagcatgcctcctgagatctaacttttgatgagaatagtatgcttattcatctcggtggttggtatgcctagtcagtaacgctagatcctcctgaaggatctagagttacctgatatatttacatacaggagatattgttttgggtagtatgtacggagtaggtttatctacaatgtcttggcgtcttggcatgaaccaagaggctacaaagtgattcccggggaattcaacgaggcttatcatatgtacacacggagtccgtccacggtaccataaaggaaaacggtcgttagttatatgtactatatattacagtctcggtaattcaaaagtatacccatttgctttcacgcactattatagtactacaaacatagtggttttcgcggtatagcatctacatagtatagttagagatggaaaatccagtatgttcttacgattctaatattgtcctagtatgcatataaccaaacagggctgagatatctaatctgcaagaatatccatagcgtcagatctactagactactaccatgtacgactacttgcactccataatcggatccaaaacctgaccagtgataattatcagattgagggacgagcacaaaaccacaccgatgtggactagtcagatatccagaaaaatgcaatccccatgaaacgagtggcgaggatacaccaaggtacgaagtgccacatcagccctaggtcagtgttgaaagactgaccgaggttgaccgctacttcgaccaaacaaaagaatagaagagttgaacagcgaaaaggcccaaaataacaaggataaacgaggtaaaaggaaaaacaaagaacagcagaatcatgcatttgttagcatccctccatgccccaagccaaaaccaggcgcgccaccacatttcggaaaaaccacgacgccgaacgatggagaaaaggtataaaccacctcatcaatttaccaagcagccagtgccgtgcattatcatcatggtgaacattgcgaatattgccgcaagagacgtatggaaagaacaatgagcaccctgtcgcgggaaaggaagactagaataaaccaaccgagggacccgagaccagtcgaggatgcccgtatgaacagaatgcaagaagaaacagagtagatcaaactgatgccagttaaataaggaaaccaaagagaaaaaagaacaaaagaaacaggccattcattcaacaaaaggagaggacagacaatatcatatagagaagatcgtcatggcagaagggcgattgtggagctatgcgaagcttcgagtgaccggaggtcccgaggtatcaagcttcagaactcgacgaatgtcattctcgatttgcctggtgtctaccacacgagaaggagacggtgagctgaccggcatttgaaatggagacgccgcgtggcttggttggggggaagcatatccagaccgctgatcctgggaggttgccatgtacggattaccatacggcgccggggaacctccgttcgaggcgcggtttgagaccgggccacgatagggaggcatcgaaggaggcgggacgaggtcaacctcacggcgcagaggtgagtgagaatgggtggggtattgatactgaggacgtccagtgttctgaggaatatgctgctgttgcagctgttgattagagaatgaggaatgagacaaggtcaactgagggccagacgtggttcgcataggagtggcatagggaggcacattggaaggacggggcccaaaggatctagcatgatcgtgagaagcataagccgaggaaggcggcttctgcgggggtggattgagtaacaggtgcttcagctcctcggttttgattcgtcgctcctcctcagtcatgtcagaggactgggaggtactcgacggtcgcagcgcattcatacgatcttggtaagaaggagcgaaagaaggaccaatgtgtaagttgcgagtgtaatcagagtttcccatttcaaatgcaaacatgccatcaggattagggcgcaaggctctgggttcggtctgaggggactgaaggaccttgttcacctcagggctgctcgtggacttctggtctctggcttgcacagcagccttgaaaagaaagtcgagaggggaaggcttgggctcttcagccttgaattggttgctgcggttgcgaggcttggacggagtcacatctggttcggggtccacctccgcatcgtcactatcggtctcgatgggcgggaccaaattgggatcaggagccgacttagagaaaaagctaggaatgggtaaagcagatggtgcaggtgatgcatggaacgtcggtcccgcgtaggctgcgctcggctttggctgaggagaggtgacagcaggctgcgttggtgtgtatcggggaccactgttatacccgttgctatggtatccagatgtcgcaggtgaagccttgctgtcccggggcttcttccctgaacgcattggcttcttctttgaggagttgaagttggttaaagaatccacctggatgaccccggggctcatgttatgcggtggggatgatgggggagtagagaggagcgccggtttctgggcgtgaggggttgtattcttcttctgaggacgccggttgttgcgcgatcccttaggggttggtggatgaggagattgggtcgacatgtcgacggttggcttgaaaaataggcagcctggagagagaggtaaagagaaaaggcaacgctatgacgaagcagtaaaaggcagaagatgcggagattgcagcaaaatgagtcagatcactgctcagcaggtgtcgacaatattaaatatggcaacgctggggaagcagagaaagtgacgtgtatcaaactgtggtagtgaacgagtcgcaagttgagtcaaagcagacgctcaaaggtaaagatagacagtctattaaaagaacttgtctacgaaacggagagtgtgacaaaaggtcaaaaacgaagatcaactggagacatctctaaagaggaaaaaagaagtaaagaagaggaagattgaatcattgttgttggttgaagggaaagaccatcgaatgcagacaaacgaggaggggactccgatcccatctcgatgactaatgacgccacctgcttcacgatctcaagaacaaaccaagtcaaacagaactattgactgctggacagggtctcattgtcgcgttgtgcattgagtacccttggagatatctgttgttctaactcccccaaatcagaccttgtccgttccatctcgacgctctacactacaatcaccgctcaatcaccgctttaacctggccatcggagcctcacttacgtcagtcaccgttctgatccccccacctcagctagcttctgttgtctcgcgccaagcatttcaaaccgaccccatccaaattccgacgagaatctcaatatggccgacgtggagatgaaggaagccgctactggctcctccaagggcaaggccgtggtcaaggcctccgataatgccgacaagaagaagttcgaggtcaagaaggtacgcaaaagatctactgtttgcagcgactcatgatactgactggctattgtcaagtggaacgctgttgccctgtgggcttgggatatcgttgttgacaactgtgccatttgccgaaaccacatcatggacttgtgtacgctgaaactaccccccgacgctcttttatcttacaagctgaccgaccgatgaaacaggcatcgaatgccaggccaaccaaggatcatcaacaacagaagagtgcactgttgcctggggtatctgcaacgtgaggacctccgcatcaccccatccgaccatgtgatcataaactaatacctccgtttctatagcacgcattccacttccactgtatatccagatggctcaagacccgccaggtctgccccctagacaaccgagactgggagttccagaaatacggccggtaaagtgggaccaggggtttcaaagacactacacgatacaattcacgatttctggctgatggccgcatgcgcaatggctataacttgaacttttttttttttcaaagacgcttctggatctttacgacggctagggattggcgggcgttcgaacgattgatgtgtcgagccagctccatagtttcccattctcatattccgtagcagacaagaaagcgctgccatccaatgattattacgcttgacaatttctcaatagcttattgcaccttcaccccgtccacagttatacccggagttgccctcgcgcttgttgaacccaaccacttctctgggttacggttgtataccggccagggcgggacaacgacgaaagctgtgaacagtgtgcccgccaagccagtccataacgtaaggtgaatgtctttgtagatgtatccgacgaggaaactggcggcctggagcagataaaacaatcgtcagctcgctctggtaatacaaaactcaatatctgtgcaacatacccctgatataaccagcaagatggtcgacagtaggtctgctagacgttggccgtggaagtcctgttatcaagatcttgttagcttcgatggtccaaaagcgcagagcaataggggcggtgcggcggagcgtacgatttggccttcaatggcatcttgaataggggcgagtaattcatccatgattgaagcaagttaatcagattcgaggtcaacacgccggatcccttgatcgatgccgggcggcttatcgcaatggtgtcatttgtattctgccatgtcggaccgccttgctctctacaatgtacgagtcgtacggagtgcacgacacttcgtcaaagtacgtacacaaaatacggatcgaagctgtaacataatttgaactcaatgatttttccttgagaaattgacccgatgttaatcttgaatcattacgtggttgatcatgatttcattcgatatcatctgccatctatctctagagccacggtccaccggagcactgctggtgggaacctggcctcgagaaactcggcctacggtcgtgtaccggtgtacaagaccctgcaaatccaaacttaacccgaatccaacttgccatgtcggaaggctcacatgcaccctgcaatgcgagaagcaaggagcggtgaaacgagatcttgatggcccatgtggtggcggttagggaaagatcatccttcccatatccaaccaaatacgcattcccccgggtcccaatgctgcaatgctgccacgtgcttgtatgtcaagcgcggcgaatcgctgactcacatgcagcgattgtgttgtgacgacacaaggcgccggtttttaattataggtgacagttgcgccatcctgagcaggctccagcagcttccattggcacgagatattattggaagcgaactgcgcgataatgcggtcagcaatctcggtgaagttatccgtggccagtgccaggatggtaggtcctgcaccggagagacagattcctagcagaccgggttgagtggccggggtcatgaattggagaatttcagtcaatcctgggatcagcgtcttgcgatacggctggtgcaccttatcctgcatggcgaggaagatcatatcaggatccggcggggaacttcccaaggccgctgggaggagtgccgcgcgctggagattgaagacctagccgaggattagtctggaatcagatagtttatcaattctggacattcacataccacgtccgctctcgagtaggtctccgggagtacattacgggcgttggcagtaggcaccacaaagtccgggataatggcaatggccttgatctccggggcccaattgaacttcctgtaatgaccaatggccatgggtggcgcggggggtctgattccggtgtccacaccacctgccggagcaggcaggacttcactgagggggatctctttgcgtgccacgtcctcgggcttaagctcattcagataggtgcccacgaacccaccgaagagggaggcagccacattatccgggtgccgctctgttctcacgcgttagtaagatgtacgtacgaatcatgggaatttttttccccccccgaggactcaaatgaggggcacatagaacactcgaacctaccaatcatcaaacaaaaatcgagtagtcgttccttgctcagacccagcttacccacctcattgcccagcatgacaccggcgaccaccgcagtaccagaggagcccagaccccggcctaacgggatggggttggtgatatgcaccttggtctcaacggggaaggcccgctggtcatgacatctgaggacatacagggctacacgggtgatcagattgacttctggatcgagactgatcttctcaacactcttgctttggtcctcataggtgatggcgcagttgaaggggagctgggatgagggtttggcctcgatggtgacgtggagatccagatagagagacaatgccaggccgatcacatcgaatccggggccaatgttggccgaggagcaaggaatcttgatcacgaaggaagtcatgataaagatggctatacgtttgtgtgttacaggggtctaaacacacaagatgtacaagatcgtctgatagtccggtatgtgactctgagaactcttggcgccaccaaaaaaagtggccgacgtcggaaacgtaagtggagaccttttcttcattaatcgacgatttcttttgattggatttgattggatttgtgaggatgtcaaatccgatctcgaatccgattgcatatattctgcattgtcggtgtgtgtttaccctatacttcgtattcttgcacatctgttccatgtagaaaggcgaaacttgagaaaaaggggctatttttttaccgagatagattgccctagaatactattgtgtcatataacctgaaaatagccaaatgccaagggcaacaaaggtccaaggccaatatgtactcccgtaggatggtagtataggaccggggggaatgcaagaagtcaaagccgcatagatgacattcggcataaaatgcctcaaggaattactctttgagtacgaaaactatgttgtacggcgtactccgtagagacaatgataataatatgacaggttattttatagtccctcttatagacctgctgaaacggggggtacccgcttgcaaaattttcacctttgtttctccctttttctcggtcatatcacctcctaacctccccccccccccccccccccccccctctcttcatnnnnnnnnnnnnnnnnnnnnnnnnnnnnnnnnnnnnnnnnnnnnnnnnnnnnnnnnnnnnnnnnnnnnnnnnnnnnnnnnnnnnnnnnnnnnnnnnnnnnnnnnnnnnnnnnnnnnnnnnnnnnnnnnnnnnnnnnnnnnnnnnnnnnnnnnnnnnnnnnnnnnnnnnnnnnnnnnnnnnnnnnnnnnnnnnnnnnnngtatatcccccccccacccccccccccccccccccactgtttttcttaccttctcctattattgcaaccccctgaggttctttatattgaatatcccatatcttcaacccttttgttctccccagtggtgactctgtgggcttctggaaccacctcggcatcatcgactctatttggtcttcgccacttccacccttcccgcttttcccactgaatcccagcatcttacgatttaaactagaattttcaattgatctctagtcttgaagcttgagaactcgaattcgatcattaacgtcattgaactcgcgaacctctcgcgcctctcgtctaacagcaaccctggagccaccaagctcctcatcctcccacttcttcaagttggcgggacttcgctacaccgaggcctctctcctccaccctcttgcaggccccaagttccgggtcttcggcgggggcgataccagacccccctaactgggctttaggattgtctttattgtggccgctagacgtcagtcggtaacgctagaccctcccgaagggtctagcttatggatggagggccgtcacccttgaacgaacctcttaccggcttgcgtctgctccggtcgttgtgcgcttcaaaagcgaatatcaccaaaccaaacccccaagcaaaaaatcagccaatctggcgccctaatcattttcgtcgaatcctcatatactgagagcccaccatgtccgagtctcccagatccgagaagtacatgtacctgaccaggtacagtactccggtacccgaactggatgatcaccgcctgcagatgcagacgcctccccgcattgaagctccgatggagcgttcttacagcccgcgcgataccactcaaggtcctgaaatgctcgatcgtccagacttgctcagtgcgcaagatgtcctacaggacggtccaattccccgagactttgaaaatgccgcggaggacgatcgttcgctgaatgaatttaatggactgggtcggttctcgatcgaccacaacgcaacgtaccagactccgcgtcgcatcagtgttgtgaacccggaactcgccaacgcttcctgcgcctcgtctgtttccgctcgatcatcctctcctcccaattcagttgaggcttttgccgacccacgtcgccgtgagcgcgccaataccctggacagccatgcgcctcccgacctggaagctatcctgcagcgcactgtttcgggtggcacccacaaccggcgcccaactttcagcaacgccagtgttgttcgcccccaattgggcgatgtgccattcgatacagcagaggaggcctgctttgacgcgccaggccgtattcccgtcattgattacgaggaactcgaggagtttgtggctctaaatccgagcagtaaaatcgccgatggcgatcgccgcaagcacagcatgagctcgcagagcaagaggccccgcatattttacgatctccgtcctggcgctgaaagccctgagatgggtccaattcagaagaccagctcaactgatacactgagtgaacatgaaaagaaggacgccgaggttacagacgaaaaggagcgggttcgacaaccccatactacaaaccagcgttcccgcttcggcttcttttcgtctgagtctcaaagcacagtgcatgctgccgatttgggagatctggtgctccctggcgaaaccttccgcgatctctttgagctcgggcctgagggaggtgtgtggtggttggatgtggtcaaccccaccgatgaggaattgggagctatctcccgggctttctccattcaccccctgacaacggaggatatccaaacccaggaagcccgcgagaaggtcgaactgttcaagcagtattattttgtttgtttccggaccttcttccaaatggacaaaaccagcgaggaattccttgagcctgtcaatttctacatggttgtcttccgagacggtgtcctcactttctcttttgaggacaaccctcatgcatccaatgttcggaaacgtattggaaagttgcgagactatgtgtctctcagtagcgactggatctgttacgcgatgatcgacgacatcgtggatagcttcggccccgtgattcgggatgtggaattggagtccgaggcgatcgaagaccatgtgtttattgccagagttgaggatttcgaatcgttcctccctcgcatcggtggcctgcgcaagaaggtcatgagcttaatgcgcctgctaggcggcaaggctgatgtcattcgtggattctccaagcgctgtaacgagcagtactcggttactccccgtggtgatattggtctttacctgggcgatatccaggatcacgttgtgaccatgatgtcgaacttggcgcatttcgaaaagatgctcagtcggtcgcataccaattacttggctcagctgaatgtcaccaacttggtgttgggaaaccacgtcaacaaggttctcagcaaagtcactctgattgctacgattctggtccccatgaacctgatttgtggtctgttcggtatgaacgtagaagttcccggcgcccacacagaaggattggcgtggtggttcggcattcttggagtgatcgcaggtattgttgttgtgagttttggcctagcccgctggcagaggctggtttgattcttttttgtttattgctcattgcctacttttccttgacttgttcctgttactttgcatttgcatgttgattgactgcgatcgtctactttgatccattttttgttggtttcaagactacgatacctacttgatacatagaatacatttcttattcgtttaaacaattgacttattgaaagttgtgtggattgcatcaagccaaggagtatcattttagaatcattcagcctcatagaagcttagtcttagcctttgactgtggtttccaagacctcacagctgacccatcatatatcaaagtctcatttggcagaggaatatagatggtacgcgtagtactacgtgtcctaaataaggcaacaaggcaacaaggcagccaaattgataagactggcattttccacgatagccagcctcatccaaacaactttcacgtcgactgcatgcagccgctgattttgcctccagcaagaggtttacagctggtgtataccaccgcttgcctgtgataattttattcgccaactccaattctggccattggctgtgcagcgacacctccctccgtctttccatgcgacgccaatacaacgcgctgcagtgctatcttactgcaacgattagcgcgatcttccttcttttcgctgtcacggtcacctatgccgatgcatccgatgtcccgggtacagagaacaccttgagcctccagggggcggttcccagcgacggggcaggattcccacttgcgctggactcgttcaatgggctagaacttcgcgacagtgtcgacgaagatggcgagtcaaatgggctagagctcgtgcgcagataccctaatgtcgcgaaagcattgggcaacaatcagttcgaggcgccgggcgcgctcgagatcggcgctgtccagtggttctatctgccctcggttgtggtgaacggcaaacacgacccgaaaggcgtgggtcttcctgcatacgtgaattctacaaatgaagacgacgatgacgatgactcgacctatgagctacggaaacgagacggggacttctcgaagcgagcgacgactacggtctacttgtcgctcacgacctgccaaaaaccatctaccaacaagaccgacctacaaggcgagttcccgcagttgcagatgtatgtgtcgacttcgcagaaattgcaacagccaggaccgggcaaagacgattcgctgcaggatatgcacactgccgttggcgggtatattggaatcaccttagatacgaataccgacgtcttcgtcggcatcgcagcgcccaattcaaccgactacacaggatattacacgtaccaggtcgcagcatctatcgatgcctttttccacaatatcgtggacgatgacccgaatttgttcttcatcgacgcggacacgtcggccgcgctgctggtgacgaacaacttgactcagtctgcgaagaattcgacaaactaccagcaatggatggacatcgtccctccgtatactatgtttgcccacaatatcaacgatacggcactgcagggcttggagaaatcattctgcgctctcgatgcgctttcgcaggtgggccgaataagtagttcaaccgaggttggcatgaccaatcgcggacttgggaataagcccaaggaacaattctatatcactggactaaaccgaagttcatcgtacagcggtcttctggcaatggtgggcaattcgaccacgtccggaaatggcatcatcggcggcggcggtaaggtatggcgaccgatgaattttacgaccaaagcaggtgagcaagcccaaacaatccataccaaaaagtgactttatctaacaatcctccagaggagaactgcgccgtgctattcaacttaaccttctgctcagaagtcgcatacgcagtcccctccaaccccaaactaagcgtcgacaagctccgcacaatctacgacgactacgccgccgccttctaccagaacttcacctattccctccaacaaatccaatgcaaaacaagcgaagaatcgatgttttccctcgccgtggactgcgacgattgcgcaaaagcctataagcaatggctctgcggcgtcacaattcctcgctgcgcagactacagtagcaacgccacgtacctagccgtccgtaacgcaggccaggccttcatcaatggctcttccctgccggatgacagtccgtaccgccagtccgtggcgtcgaatacatcccgcaatcctatcatcgatgaggagatcatgccgggtccctataaggagatccttccctgtcaggatatctgtcatacccttgttaaggattgtccgtctgcccttggcttcgggtgtccccagggcgcgtggatgaattcttcctatggctatcggaattcagagggtattattacctgctcttatctcggggctgtgtattatttgagtcttggggaaaagctgggggctagcggttgggtgactagcttggtggttatgggaattatgtatttgctgtagataggtataatcactgtgaacttgtgctatttgggttctcagttatttcttttcttgttcttgtctcctctagatagcaagagctcgacctagttcgcctgtgcaccttaatattgcgcttagacttgtatatcatagagcaaataatacatacacatgtaacaaacattaccactccagatctttcctcttccccaatttctcttctttcttctcactcttcttctcttctttcaagactccttccccttcttcaaccgccctatccccccatctctccctccaaatcccaatctcttgcttccacaaatcccttacacagggatcacacgaactcccacagcaatcacccagtcctagtggaggcggcgggtcattatatccccgttctcctgcacggaggagttgttttgtgcgggttcttgttagacgggtcttgtagagctttttgtagagaggtgtttcttcaggagtgtaatatggctctggggtgggttgtgtagttgagtctgagtctgatgttggggcatcgattgatatctttgttggactctttgttgtctctttttctttctccttctctttgtcgttgcttggggatattgcggtggttggctctggagacttggccgagaaagagaatggagcgagcagacttgaaaggaggtttcctggggagtatattgaagatgtggatgtgtctttctctttctctttctcttcctctttctcttgttcttcttttgttgttggtgtctctgccggtataatgatctctttggctttggtgatatttccagatgttgatgccgatgaagcagtctgactctctgatgtctcgatactcattttgatatacagatactgaaatcaatacaagcgaattgaatcatatgaagaccaatttagtctctgttcaaaatctgttatcgcgttagtaacgtttgaagaattgatatagttaactaaagcaaacccacaaattctaggccaaatctaatcctctaaatcttcaattgcgcaaagatgtataatattcataggcacgtcgttgcaataaagaatggaatgagaagaccatgaaggccgaagaagtaccgggaccggctaagaactgttttcgtgcggttcctgttcgttccgatgtccaccgactcctatgtttaggacttggtctatgttgcctgaactggtattcataaataaggcataattggcattttttggctaaaaaagtaacaatacgtccagtaccggtatctgtgattgtttcccggggagaaagacatccaaagaaacgaaacgccgttcgagtatatcaactccgtggtatcatgcagctaaaaaatataaaaagtcgagccataaactgccatcattttcgcttcggcgtaggcgtccaaacatttcccagtgcagacttccgctcagacctcggcgtccctccaacctgctgtaacagcttttgcgctgcaggcgtaagcatctttccctgggaataccccccaccggagacagagcccctactagagctagcaccaggagtagaccgagacccaaaatccagccggggactactaccaaagcgcggtgtcaacgagacaggtgtcttcgtaacacgggcggccttttcagcacgcttgttccgcgccacacgatcgaccatgcggtgatgcagggcttcgcgtttgcgagtttcgccaagtttgaagggatttggcttttcagaggtcggtccgaggaggcgccagtcggcttccatgtcgtcggttctagagtatgtaaattcaggttcgggctcgtcttcgtcgacaaaggcgtatccgttaaccctcggggtttcgcttcctgcgaaggcggatgcggcttcggactcgctgagacgcggccggccggcgatggcatcttggatggcggatagagagggcgaagggggcacggcgttggcggcgtccgctgctgctgcggcatgtgggtctaggagtctggtattttggtagagagttcgcttggggcctgcccgagatgtgatttctgctttctgcgggagtgtctcgtgggtatcctccaccgagttggggaggaacatgagggtgttgtctgggcggcttttccatgtgtctggatttgcaggacgggcatccaggtctgttttgatggcgggctgggcatgctcgtctcgttttataagacccatctgtgggtttccgccttgagccgtgatgcgcttaatttcttgttgctggtgtgcaatttgtcgggccgagggaattttgttcccgctccaaagccagggatatttctcccgtcgcttttcattctgcttgtcaaggactttgttgaaggactcgttatcttcgctggtatactttgcctggaaggcgaccagtcccatattcgatacatcgggaatatgtcggtcttctgtttcggttgccgctgtggaagtcgatacgacggacatgggagtatcacctccccagccatgtggagtgtcacccgggcgtccggccgggaaatgatgtggtgtggctggcgccgatgcatagtctgattttcgtcttgcattcgaccccggggtgggcgtgcgcatgacgcttgccaacttcttcttggagcttgcaatccatgctttgtctttcgattcaagggcttccaggtactcttgtttgatctgtgtctcgagcaagcccggaaagaagtcgcgagcaataatgtgggacaaagtgttcgtgtagacgtcttcgtcgaggacagttgcagggcgtttgattcgcttcgggggtggtggtggaggcataagctggccagcagattgtctggccagctcctgcgaagggggagacgccatgtttgtagagcaaaggctgagggagagaataatgaaacctggaagagaggtggatgaattagtggcgataagatagcgggtcatatgattttgatctaaccgctttaggcaaccatacttcagatatcactaacatattgaattgatagatcatatcatgagctaagtagggtttaggtagaggatttagataaatcgtcagataggcaccagctgtgagatggcatccaaagccaaagacctatctagattgtaaagcccaggcttgcatatacatccgatcttactaattgaagcagcgtatccgtaatgcttttttactcggagatctttattggagagtgactctaagatgtaagccatgcttcatcttatgaaactttctcagatataggcagtgacattgtgttggaaagcagcgtcaaacttaacattcgttcgcgttctcctggggttttcgctgagcccgtaagcatggccagccgtcttgcccaaaaatctcctctcaaaggtccggggcgtgagtaaaactgactccaagtaccagcactgcaatggtgtagaagatcgtgatttccatcggtcaggacctatgtaattgatttcctctgccacatcttggcattctctttccgtattagtgctcaggccttgctgctttttgctcactgagtagatctaagcacgccactgagtctcagctgagcctaaccagtgtgtcacgtgatcttcgcttagtccgctcccccttcttacaatgaggaaggcatcggtctggagaccctcaccttcctccctcccttactccgttccttcctcctctcctccttccttctaaaattccccttcctgccttgtgatggtccgttgataggcgggaatcttttgcctttccaattgtatgagcatcaatatctgcatattcatcaacctaggaactcctcaataaccaagccaagttagtctaatggtagggcacctgagggacataacctctgatttttagggctcccaggtgagctaggttcgaatcctgggcttggcggcttctctaaatttattttttttaaccttgatgtctctcatacccctaggtatcgtataattccatgggtatctagaaatatacctatcagtacacattggtggaattatttcgtatcaaatatatgtacatactctctgtttcagtctttctgacgtggagagagagggttgggcatagcgaaagtgaagccatttttgaattttgaggatctatgggtcgttatcttacgtcatagtatatactaccttcaatactattgggtagaaatgagccgtaccccaaaacaatagcggccccacaaccttatttgtacataggaccgtggaagtacgcttccctttcaacaatatcacgctttctaactctcttttcaaagtgctttttatctatcaattactctacttgtgcactatcagtcctcggccaatattgagcttcggatgaaatgtcccgcccatttagagctacattcccaaacaacttgactcgtcgaaggagtttcacacaggcgcggacaccccatatcatacgggatcctcaccctctataacgtcccattccagagcgctccgaaagtatcctctacgtattaaattgcggattccgaaggggccctctcgccgctctccactttctgcttcattaatctgacagaatcaggcatttctaggcaggggtgcgcggtgtgatctctgtacacgatcgacttggaaagacatgaaatgtagcttaaaattggatgtataaatttattgttacactaactacagaccaggctttctttcagtctatatatacaaagcagccagctggtgacatctgtcttccctttcgatatctctctccacgtatgatatattcagaaatatttattcatagatatatttatagatacccatggatatacttctaccatttataggttccaaggtcttttatattcgtgtcaagcctttttgggactatactctcatcatctttcactcatagcctgggttatcaactcctcgcaacccgagaagtcttttctgccctttcatattcttctaatctgataatatttcttctttgattactctcattacctacacaagtatatcatacacgatgtttgcttcgacaagaacaaaccctcctagcactgagaaagcacttcagagcgttcctattatgtcttcttcttcagcccaagatataaaccaggatctcgaacccacatctgttacctatcctaccccgaaagttctaggactggttttactagacgtccttcctgttgagctagtgctactagtagcattttttcttccccgggaggatatatacagcctctcactttgcaatcatcgacttctcaaaatattccaaagtcagacgaagcacaaactgaaagcagaagccctgttgcctttcttacgccggctcgaacatgataatccaagatacttagcatgcgacgactgcttagttctccatcacttcgacagaatcccagagcctttgcggatcccagacccgctagttcaaatatcaccctactacccacccctccttggttgcgtgcaaacggctagattctggccagttccaattgcacataattatgtgcggatgcccatccacgatggacgcagcacccattgtggctatagactccactggtctcatctccacctagccatgcgcggattccaccacggtcccgaatacgggatcagcactgacgcgctggccttcaccggagtatcgcatgaactgattgcaggaaacgactccggattggttctatcttcggtggaggcgcggatatgtcctaagcccgcgggtctgggtctgtatatgcgattccaggacatgattgtcgcgaaaatgacatggctcggttcccaccatgaaggcttcaaattctgctcgcatcaatcaatgtcgttttggctggaggatatgtatgggaacgagacataccagccggagttttattcgaattgcgaggagtgcaataccgactatgagattgggtggctcagaaacgaagagcttcggaatatcactgtagtggtgacgagatgggttagccttggacctggtcttactccggatgatccccgatggaggattaatgcgtactgtgagacgtggggtcagcctcaaggtctgaaactggagtcggaggaaaggggtcctagtcctcggtggacctttgaaggactgactgatacctctgttgatactttgacttcgcacaatctctcctacatcgaagaagacaggtatcaggctgagatggtacgagtttctgatgtgccttcctggggcctatggaagggggcgccttggtaaatatttagttgatatgtggctttgtagataaacaggacatgtgatagtcgctgctcgaatatgttgtacgtacagatcctccatcaagtatttgattcaaggcagtcagtcattgatcctgcagaaagaaccgtaacacaacccaggctgaaatcccactccacaggtcttaactaaaatccactacacataactactctttttctctacacctatacttgcaaagtaacgccaacgaatggtattgaagcctatcagctcctctataaaaatcaaagtctataagaaaaaccagagactagcgaacgatccaaataaattccgaaatttcctccaagaaaatccttttcctttccctctttttctcttttttcccaaatcgcccttccaagacaccaggccagtaaaaatcgctatcgctgagaaatgcatggacgaaagattgaccacagctgaaacacgcagaacagaacacaaacaaaaagatatggcatataggcaaagacaagacaagtcaggcataaaacagagacacaaggaaaacacagatcgtggactcgttgagagatgttgatggagggctatcggatgacaaagcgagaggtgtgagatagatagtcatgcaaggggtgaggaaaggaaaatatcaacataaaaaaaatggggttgatgataacgatagtgacatgtactcagtaatcagtgagagatgatcagtgaggtgatcagagagaggtgatcagtgagaggttgtggggaagagagagtaagatggcgagcgggtcttcctacggttcgggtttctagaaggaacaggaggcaaaggagcctcggttttaatcggcaggggctcgccctccgaaatggacttggcgcggtcatggagtggcatgggaagatctgcaccctcgagactcgtgctgctgccactctgaaggaggaagtgcgcctcggcgagactcttggtctggcggtggtgggaggatgatgtaggacggctgagtgtctcgccggcggtcatgcggtctgttggcatgagctcgcggctgctggacaagctatggacgagctcggggacgctgttcgtcgtcgagatggaagagcggtgcttgcgcacgatggaggctgcgcgagagagcattagactctcttgcgagttgcacttgcttatcggggaaaagctgctgcgtggggagatggcgcccatcatgccctgcgcgaaggggaagtggcggtctgattctccatcagtcgtcatgtactcttcgtacaatggttcgtgggagagtggtttccccattgatgggaggatcgaggaattgacgggatggaagtagtctccgctccgtgcgatgaactcctgctcatagtctgcagttgagggggcctgggaagggattgactgggctgggctggggtccaggtctggggttgctagggcggaggtgctcagtgggctcggctggagctgtcgggttctcggggcgagccaggggccctcgctgcaggctgcgccgacttgagtgtgtccttcgtccatggatgtgccagtccaatcgaagttggaagtggactcggctgcgtgctcatagcagtagtcgatgtctgcgtcccatgagtcatacaattcatcctcatatgatggctgcaagctggtgaccggctcgggtggtgtgacctgcacctgggcgcgaggggtgtgcatgttctgaatatattgggggatagtcggcgagcccaatgcctcggagaacttcctagaaagctcctcggccacatagatcgacaccggagctttgcgcgcgctgctgggcaactgagtgtgggctgggggtggactggcttgaaaggctgagcgagaaggggggcattccatgctggactcggggctgtcccacattcgggttccttcctcttcctcggggacatcttccaaatcatagtggctgctcatggacgaggtcctggcgcggtcatcgggttcgggactgaaaaatcgggttggctgcgctgtttggagatctgggtacgtcatcgtcgtggacaagcccaggatctcgtcaatggcacggggtgccggctcatcagtcccatgtgagggaggctctggcacagcagaaggtgggggagtggtagggctggttcggggatatctggagactggccgcgagaagttctcgttgacgcgggattctctgcgtgcgtggtttgcattgtacagtcgtgtttttggagaaaccggtgggcttatgctgggcacatccaccgtggtggcagtgccaaacgagcgcaggtcatcactggagaaattacggaaatgaatgtcctcggcgcggatacctttcagatcaggctggggccgttgagatgctcggatggccgagaactcggtgaccagatcattctcgcgggtctggtccaaagactggaactgcgagggattggtatgagtcaagtggtggaaatcaaaaggatcagaaataatgcttttcaagcgttcgcctatatcgattgtcgagggtcaattgggtccacaatttccgctgcccgctgcttggcgcacttactgtggtctgtattacgggcccgacggccaaaaagctctctctctggccgggccttctcacgatcggcctcatcttcctcgtccagcgtggcgacaatgttgatcttgctcccctgccggcgcaggatgcggcttccccgcgccaaaagggaccgggacggcctatccttctcggagcggaatcccaatgacgacccggcccggtcatcggagacaatggaactatccgtggaggtcatcgaagagcctggtgagcggcgtgaagaagttgaggtggtggtattgcttcttgaacggccgctaaaaacggacaaacgcctggggctgttggcgtgggcagtggacctggagcggatatgtgcggcatattcaggttgctcgttggaagagttcgtagacggacggtcactgccgtcgtcgttgtcccaggctttactcattggagggggtggataggtcgacatagtgggaagtgaaggagagaaactacaccatgataagatgaaatctggagatctccgccgcctacaatataaaggagcgaaagtggaaagggagggttctcgagtggaacagaacgaggtcctgccgatgataataaattaatagaatacttgatgacgggggcaatacaagacacggagcggtggtggagccgcgttcaggggcgtatttattgtaatttttatttcttttttttttccattattagtatatgatgctatagtcctcctatattggtgttattccgatcggtttggttggtttctttgtttagattggagcggtcacaccatgcacccagccggcttcattattgatcatattccacgccgacaatccaaaaaatgaggaaacaaaagaaagcaaaccccaacatacacgggatatagtgaggtgcctcgaacacccccatgtaaaggacgggaattcccagcgtcgcggagccgatacccaactgccttagtggcatatgcgtcgagccagggggttggtcctgaacgtgctggagacccgcgtgtgggggagccagaaagacgctaggccgcatgtagtaaagtatcagcgttccgatacgccccgtctggcgatttaatatgtttaatctgtatttttggtatttttgccgtacctcaggttccaaggttccaaggttcccaggaaggtttaccgttagctttggacccatggacacgggaaagagggggacacacgatatacgcgatcgggcttatagattgagtactactgtagtactacaggtacatggagatgagcctagatatgtacttcgtatagacaaggttgccattgggctagatattcaattgcatatccaattggcgatattgaaacagctctatacttgattctttatttacattcgagtggggagacaagcccttatcacgattggggcgcacactggaaccttggtcgtctgtttttctcccttaaaacattgtataagtatcagaactacatatggtggtttgaccttttcttcctacatagctacatgagtataatctatgccttgcgtgaggtttgagaccagtcaggaacgcctctttccttccccgcgtcatatagcggagcctcggttcaacggttttatcacagaaggacccagccctaatgtgattatagtgtgcactgaaaacatagggctcgggaaacaccagtcctagatctcaatctactttcggcatccggcagtggggtccagaagcacaaaagtccataataacattgtattacaggataatatcggtttaattagcctaggcatacatgtgctacagcctacaccggcattcctccagttccccagttcaacctaaacatccctgttggtacaagatggacaggcaaggatctccatgcaagtttgttcttgtgatcctaccgagctgtaggggctgatcacttcgcaggcagcctcggagagtgccggtctcctatctcaggcatatccaagcagacttttttttttaattaaaaaagggaagtgaaacgtatcagactacaaactcacactgtgtcggggatgcgagacgaagctgaagaatgtgagtatccggcagtcaccgcacccttacgttatgtctgtcggagagttgcattgtctcagggcggggtatatccattgtgcctggtatgtgcatattatcaccctggtagtacgtactgctccatacggacgaagtacatcgaatcgaatcgaccgagtataataagcaattctcgcttggtattgtcgcacatgattacttttcctgccgttatggtgactcgtcacacacatattctaatattcacgtcgtctgtagtccacgcttcctatctagtaagtggaccttagtctgcagctagcatgattcgaaacaagggagacgaccgaggggaaagccaaaaacagtttcattctatttcagagtacggagtagaatataccgctagttgtagtgtgtatcgaagtgtaaagtggactcctgatgatcttatagtctagaacgtggactccggtcctctgtaatgagaactctcctccattatgcatacatatgtaatattgtacctgcgtagtgcggcacttgatattcttaattacttatatagctctctgctccgtccacgggtccactactgcgtactaggatcccctttcgagaggtctaacaagcacgttcccccggcggttcgcgtttcgtgtccatgatcgtcatcacgcaccgtactccgtactccgtacctttttatatctaggcctaaaccgtcttcttcttcgtcagatttgtgtcagaaaatacgccccgagattggagtgtcgtcgactgtcagatctattctttaagtttttttgtcgcaattttgaaacaaagagatcaaacagacgcgtttctggaatatactgagaatatactccgtactgataattaattaaagatgataaatagtaaatgtagctagccctagaatataatgacaatgacataggtgtagagtcaaggtttagggacacgttctggaaaaggagggaaaaggagcgaatccgaaaatttttagtacccatcttcattcgcatggttcgccctatcacgaacaccttcctattcatgcctcccgaagatcgacagctccaattcccgtgaaagatggaagctggtccccgacttcgggagtcatgtacgtactccatacctttaaaagccaattgcaactgtggtcttccgttttcccgctagacggccataaattctaatggtagtttagtatcgggtaacgcgctatcaacgtagactgggcatcatcccacggtcgcctatctcggtcaagcatgtaaatatgtatgcgcccgaactaccgtgtggagaatggatcaatctaatattccaagggtgtaactacaggggtgattgatatctaccataatggaggctgaatatctcaaactatattccattccattggagggagataggcgggttgattgtccttattagatgctaccatgtgcgacgatcccggggtttcgatcctgatgtaacctagcgttggccgttgaattaagtacatgataactaactagttagggcatgacagggatcagcggtgttgacattacggacaggggactcctttcatgttgctaggcattttgtgatacatgtgactcccaagggccaaggttgggctcttcgaatgaccaaatatgagacaaggaatagagactattggaaatagtcgattatccttctttctttgagcacccgtgctctagttatgcatcataagttgcatacaaagcattggaaatataggagtatgttgtattgaaatattgaagccggcactaagctcattacgataagtgatatcaagccaaatctataacgccagtcctttgtctttcgagcccagatttcacgagtccactcaattctaagtcccatgttagctttggtcttctagacaaagggtgaaatgcccaccgctcgatcatgagatctagttgacagttcattcgaggttcggttatctccctctttgttaccagattctcggagcttcggtcctggttgagagtgatggccaactctaaacgagtcgtggttactccgtacttcacttagcaactccagtggtcttgtcaccaccgacattggcagcaatgccgagctcactgataacatccgtctcggagcgcttcgcaactccggtggtctccgcgccaccgacattgatggcagcacccagcttgccgatcagatcagagctagagtcatcgtcgtcactgccaccgccgtgaccaccgccgccatcgccacgcttagcgacaccggcagtcttatcaccgccgatgttaacagcaacgccagcatcaccgatcacatcgttctgtttggggacggggactgcgagtgctgtgactgctaacaggatgggagcgatgagagtgtagcgcattctgatatgggttcagactggaatggtcgttagaactgcttgagctgggctctggtaggtttgtgctcacttatggtagagaaggtacgtttgaactggactattcttaactggacttggagtgaatagaggtaatctggctagcaacatccctaggcagatgagcaggctatttaagtatatattgtactatcgtacatgatatctggatagatgtttgcggcatgatagctgatgtgcttcaggattaagcaccagcttagactgtattctacttggacgaggtggatgtagacttgatctatgacatatgcgtagttgcgatgggtggatgcccaataagggctacggattagcagtgggaagactggaaacggtgaaggtcctagtcctagtaattggccttgtgttcaacatagaggtatgcgatgatcgtggcaaagacaacaacaatgatggagagaaatgatccgtcgattgtagtttgacgatccttgacttatttgggtagtgacccccaaaacgatgcctgcccttgatatcatcggtgaactcgatgctacgctgcacctggatttctctaaatttcaggttttgttcctttgttttcgttttttttttgcaaagtgagtcattttggtagaatcaggctacaggatattttataataaactacatttgaatatcgtaataatctaatagagcccaagacgtcaagccctaacgtgtcccgtcaagcttaacgaaaataaagttatccatccataagagcaggaaccttggcatatcgaaaacgttggaattcttctagaatcttcgaagtattgtttttcccctcgattgcctgactctacctagaatatacctcggtcccactaactaggtggtacccatttttccatgtcgatatagtggctttcaatggtgtcttacgatctcccctacgtactctctatacctttctaggatctcgaaccttgaacctcgatccgggtactccgtacggagtaaataattacgtgtgcatcctgagattgtctgaaaagtccaaatcccaaatcccaaattcgatctccgatacgtactttgtcctacgccaccgatcagactaaatgtccaaaagtagcacggagttccgtcgagtgcagcaatctcacctcaaccgctaaaagactcctgccaaaaacatgccctaatagacgagatatagcccccaatgcgacgctggcaactgcatgagacacgggcccctcggatcctccacgcctacaccatacacctgctaccacatgcagttggggcacgtctaattcactagccaagcagctagacaccttctggtatagctgctcggtgctccgtagggatgacaggggtcaatcccaccagtgaccgcacgtgcaaatccaacatttccgggcctgcgcaagccatgtctcagatggctgaaccgttttgctagctaaggaattatctccaccggaattccgaggggagttggggccctgccagattcgtgttaccgaatatggagttgcatgttcggtagattaattcgatgcaggtgctgcgcttgggcctggcgtgggtttctttttaatctattttatgcccctgccatcttctttttggtgctgggtgcgccgtgattgggtggttcttttgttactgaggctttttagatctgtcaatgccggtatttgaccgttccttgtggtgttcgcatatcggctttacataccttagtgggcacggagtagtacttggtgtggtatcttggttaattgcaagggacctttgttcgataatgtacagggttggctttttttatttttctagattttgtagactcataacgatcaaggctaataattacacatggcttgaagtgcattggggtaaatgtatcaattgcagttcaaatggccccttgccagacgcctggatgagaaaatggaaatagaactttgaatagtaacagaaagagtagtggtaatgaggcagaattcactcttgcatctccgtgtcctcggtagttttcgaaggctcgccgaacagttcgtcgtcgtcgttgtcttcagtgacaaccttttcggcttgcacttcttgttgcacctcttgctgcacttcttcttcctcgtcctcgtcctcgtcatcgtcggcaatacgacgagacgccttgccacgacgacgcggcgcagcttcttcagcaggctcgtcatcgtcaccaaacagctcgtccttgtcttccccagcagaccgagcagcctcttcatcgtcagagtcaacaaccatctcactgctcttatacttgccaggcttctcagacttggcagcctgggccttcccgcccggtcggcgttccaagcggcgtcgcttcttaggcgccgcttcgccctcgctctcagccgcgctgtgcacagcatcggcttcttcttcatccgcgataaaatcatccccacccttctttttgcgcttgctggtaggcttcttcttgcgcttgacccggtcaccggtctcggagtcgttggtcaattccgcctcctcacgagcgcgctcgtcttcagcgcgctgcatggcatgtcgttgcacctcttcgaccatctgcgcgcgttcctcggcgatacgcttcttacgctccatctcgacctcctgggccttgcgcagctcctcttcccggatccgcgcggcttcttcgcgggcttcacgggcttgctgaagcttcgcggcattcttctcttcgtactccttctggctctgcatggctcggtcaagctgcttgctgatggtgcggcccatgttggctcgctgctccaaagcggcgctggggtaaggcgggttctcctccttggaaagacgctcgaaggtttcaatggcctccttgagaccctccgctgcctcttggacatcctggagcgtcttctgggtaggctgcagaccgtacgcgagcgaggcgatttggttctgcacgaaagcaacgttgaattgcaggtgaagttgatccggagagacgtcgcgtgcgcgcgtggcgtagtcgagtgctgtcttcattgcggccaagtttgcctcctgcttgcctcgtagccaccatacacgaccaagacaagccaagatttgcacatcacgctggcgatccttcgacaacgcagcctcgtagtgttcaattgaccgtgagaactgacggagctcagcgaagacatgtcccaagttgaggtaaacgctggggtccttgaccgtatcgcgaaccttggacaggatttggacagcagagctgtggtctttcttgtcatcgaccagggcgatcgcaataccttgggccgcatatgcgttcttgggatctagctggagagccttgtcgaagaactccacagcacgctggtaaatcttgcgacgcttttccttgtcttgatctgtgtcgcggcgcatgtcacgggcagcgaggagatgaacattgcccattccagtcaacgcgtagcgatcatgtttgtcatagtactgcaacgtgtgcttgaaatggcgttgctcgctatcttcagcaaggttggcaactcgtttcttcgccttgctaagataccatccgtagagtgcccgaacttccagattcgtgctgtccgcttcgtaaagcttgccaatcttcttagggccctcgtctgtggggctctggcgaagggcaatatatgtaatacgtgcattagcttccgtgtagtcagagtgacgctccagaagaccttcgtagaccttcttagcttcgtcccacatgtcggctgcctcgtaagtccgtccaaggttgtagctaattgtggtgacgagcgcatcggtatccgtgccatcctctttttccttggactgcacgcaggcgttaagtgcagactggaacaagccacgagctagagcaatcttctcgctctggtataggaagcagcccatgttgttgaggagctgcggcgggagactctccctaagagcagcgttcatctgatcctggtcctcgatgtcaggtcgagcatcttccggaatttcagcaatctggatctgttccagttgggtcaggcactgcatgctcttatcaggagctgtgccctcgtagagacgggaaagataaacaagaaccgactcgtcgggggagatattttgtttctcgtccttccacatagagcgcactgactcaagcaaagtgatggctcgctttgcctcagtcgacttgtcttccttgctgcctgatttctgagcagcgaatacttcttccgcgtgaatagcagcaaggaggatcatggcctccgggttcttcgattgctgaacaatcttctctagtttgaatttggcaccgtcaaagtccttgttcgcgatctgcatttgcacagcgccgaatttggcgggaagataacccttgtcgactccaccgcgggcttgatcggaacggttgtagtactccgtggcatgggcatcgtcgccttcatagtgcgacttgcgaccgaggaggtaccagccgtcactggcaatagacataacatctgtgtgctcgatggctttgcgtgccaatgtctcgacggtgggatatgatttgcggaggaggaagtagctggcaaacagggagcaggtcatcgggtattccttgtccagcttgaatgccttctgggtgtattgagtcatggctaatttgtacattgacccaaacatagggtcggtggtggctcggcgagagctgtcgtggaggtagtaaactgccagcaggacgttggcaaccttggactcggggttctgcatagcgatgacggttagttatggtgaaaaataaaaccttgcggaactccctctcgcataccagagacaaagatctctcccaagctaccttggcttgatccttgaagcccagctgccacaagcaacatcctagaccaatacgagggtcaggatctgtgaggttaggcatcttgatcagagccttttggtatccttctagtgcatctgcgtatcttcctagcatgtaatgcgcgcgggcacgtcccagaatagccatgatgttccggccaccaaaggccttggatgactcgtcgaagcatttcagagcctgccgcagcgactcgactctttccgaggtatcaatcgcacctggacgaacagcacggggcgggtatagtgatgcacggaggagacacaagacaccacgcgccaggaagagaggaggataagccgggttgagtcgcgaagcctcgttcaacgtcgacgtcgcaagttggaggtagtgatctttggtcttggattccgagtatagttccccttcgggcgcaactcgaggggcatgtcggctctttaacagcagcatccagcagatccagcccagcaggccgagtttctcctttgtcgctccgtgggcgacggaggccagacccttagtcaagatgtcgatggcatggtcgatctgctttcgcttcgcgtaagcgagcgcaataatcacccagaaattcttggccgctttttcgttctccaagagggtgcaaagctcagtcgggtcatcggggagctcgagcaagctgacttcgacttcgctgtcgaagctggacgcgggaatatcgatagcatcggggatatcggagaagcgcaagctgctcaatgggctagctgcaggtacagcatcaccgttcaggccattggtttggccattctcaagaggcgccatgatgagtccgggaacgggagggatgaggccactttgcgagtcggtatgggattataggagcctcaactcatgatcaagcgaggcgatccatcaaaaaaggtcagaatcaggagcgttaaggttagcgaccctgagtttggagaaaacgcgaaaaattgactctcggagacaacagcgcggcgatgagaggtgagaattgaacgattggagtggctgggctgcaccgccacaggacgccacaccgcatacaataaacaacacaacaccttttggacaattgaatgatcactttccgatgttttcgaaatgaataagagcaaaataagtggagaaaatggcatttactaaatttactagtagaatacctaggtgcggtattcatccctgcacccagcttgttacaaatttgcaaagcaaagcaacactgagcagcaccccgaagataagaccaagctcactccagtggcgcaggcgaccataggactcaacatatccagctgtagcagcaaccagctggccatctattgcattatcggctttgatcgaaccggccaactcggatgggaaccggcccgtttcgaagtactgatccataagttgatccttctcggcccagcgtgctgtaagccagtcctcaaactccttctggtcatcaagaggaatctccgagacgttgaagcgtctccaatgcatgttgactgaggtcggcggtcgtccttgcagatatgtggagcgaagagtgaagtatttatcgggatagcttccctttctatagacggacttgtgaatatcgttctactggaatatagggagagggaaacatacggtggcccttcataggctatggtgcagtcatacacccagtctacggttccccgcaactgctgaagacagaacaacagccctgtagaccgcggaagaatcacgtgcttgaatgaaggcagtccctgtttctgcccccaaatgtcgctgcgtctcttggtattggtggacaggtttgtcccctcggggaagattagcagccacatgggatcgtactgcgggcgggctgagttggagcccccgtagacagtcttcaacttctgcaaacgatgctcaagccttggcttgtcagacgtccacttgcgagccatgaagataaaaccgtagaacatcatgcccgtgcccaccaatgggatatacttaagcgactctttcaggatgatgaagaggcggccatgcatctggttggtgtatgcaacccaccaaaggtaaacccagtcagtgtagacctggtggttcgagatcagaacgagacgctcggggaacctggtctccagtaatccatctttcgatagatggatctgcccacgcacgctagcatcaccactgacccggaagagcgtcggagagctccattcggtaagagcagcgaggaccagtccgaagctttgttttgtatatgccatatacgaatagtagtaacgtttgttgatcagatacagcggggagccgattacttgtgtcacgcagatcgctataatacagcaatccacccatgtcatcagcagaagtgaacgcagtaactgcatgggaatgccatgtttgagacggggatcggaaggtggtttggtcgagagctgctgaagatccccgagatttgcggtcggcggcttgcgctgtcgaacctcggcagactccatggtagaagttcggaggttcggagatccctgttgttttagagactgacaaatgaggtagaaattcaagtaatagactggaagctagtgaatgcttctacagctgtacagagcccggtctggtcggatgtggagaatcgagatagtgatgatcgatagtatgggctgcaacaaagctagacagaagctaggaaatgaaataaattgccattcccttgaggaaagaaggggattataataaaagcgattgttaaatcaaaagagataagtgttggggagctgaacagttggagagttgaatagttggaggggaaaatcaggcggatctggtggatccaaaatgacggtcacagcctcataacgtcacctgagtttcttattatttactttgacacctttttctttgtgattcatccaattctctgagatcccggagctatacaacttaaaatcaactgttgtgtcaggtcattatacgccagttcctacttcgggctgaaagatggcgcgttgatgtgagcaccgaccaactcgaatcctcattggagtcctccgggctgatacatatgactagggtcgataggcctgcgattcttcttacaacatgctctgtgccatcatccgcagaagctcgcgcaggagttcccgtctcgccttgcgccagcatttttccacgtctcaaccacgtcacgaggtcaaagacatcggctctttgtctcagcgcctaatacccaaataccaaggtgtggcttggagctgtcttattggagcggtcttattttgttggtaggaagactaatatattctcagaatcttgtgacggagagctgctgtgtctccagtggccagcaccgccgcgaaatatcttcttggtgcgcaaagattgcgccccggcggttacagattccctgattgaattcgtcaagtaagatcgagagatgcccacgggaagcgacttgactcaaggctgacatctacgagccatgtttcctctacatacccatctatctcggtgatcctcgagtcaaagactgccgccgaagtacattcgtcgctctcttttcccgtatactcggtttctctcgacgaaaaaacgaccgcccttcatgataaagtcgacctcacggtgaccctgggaggcgacggtacgattctacatgcggcgtcgcttttcgcgacctgctcaaacgttccacccgttctatcatttagcatgggtacattaggcttcctgggtgagtggaagttctcagagtttaaacgtgctttccgagaagtctacatgtctggtgccggggcaggtgctcgcacacctgtgttagaaggcccagaagcgacagtcacacaagaaattgagatgggcccgaccgggtggtcttccgtccggggaaaatcaatgggctctacgcgcggggcacgcattctgatgcgcaatcggttgaaggtaggactgtttactgccgacgggaccgaaacgacgcctatccgaaccaaaaccgaccagggtcagggagtgtatgtgatgaatgagctgctcattcaccgtggcaaagaaccgcacttggctgtggtagatgtgtttgtgggtgggcggttcctgactgaagctgtggccgatggaatcataatttccacaccgaccggaagtacagcctacagcctgagtagcggtggtagtattgtgcatccgctagtcccagccatccttctaacgccgatctgcgcgcgtagcctcagcttccggccattggttctcccttccagcgcccccatcacgctgcggctaagcgaaaagaaccgtggacgcgaactcgaggtcagtctagatggtgtcaatttaggccaagggatgggagttggtatggaagtccgagtctggaatgaggagatgcgtcatgggaagaatgagtggcagggcggtgtccccagcgtgatgcgacggagtgtgggaggtgaagcgcatgagggctgggtaggtggattgaatggattattgaaattcaaccatccatttggcgaggtataacattgtacgataatataggatagaataagaagatcaaacacgaccccgtacaaattatatcaagtggaagaccgtggatccaatctccttaggagctgatgtgattggcagaggcttgttttctgtagatgaacttcccaagtactctcggccctatctcaggggacatctcttccccccctttccctcttcattcttccccaacactcaacttgcgattcttttattgattctttgaagtctgatatcgcgttgcttattcttgagcatcctcgcagtgcgaggaccgctcctcatttctagacaaacaggtacctattctacccctccttcgattccctcgatactactctactctctcgttatcccgggaagtgagtgtgttcgagtgattctctcgacaaagagaaaatccctgaattgtttttttttagggcatcctctccctgaatgcagttgctaattcctgtctagtaactagcgctagccggtcttaggcctcaggaggtctcggcgcattcgtttacccatactccctcccgccccctgcgcgacctgggaaatcccttgaacaatgacttcgtatgggaagtacgtagtcgcaccatctatccttggaaccccgaatctggtggaattttactcaccctccatagcaacatgtacgcgccggagcagttcatgaatccggggccagccccccgaccccctaccgatcgaccccccaagttgactctacccaccaacagcacaacatcctcctttggtcagatgagctcggactctccgatcacaccgggtctgtcgtcggcaaatctctcgcttttccccaacaccagcagtccctcgctggctgtgacccggagtaacactacccaaaatggaatctccattatcaaagaaggcaccgtccgctgcaaagaggacaagttcttggccacttggaatacgcgttacttgatcctgcgcgaattcaaactcgagtttttaaagagcgattccggcaaggtagtgattaccttccctttgtccacggtcaccgctgtcgctcgctccgaggattcgaagatggcctttgaggtcactcgcctggccaacccgaaggatgcaaactccaaaaccgccctccttgctcgagacctacctaccaagaccatcacctgcgaagtcaaatcggacgatgaaatctacgagtggatcgacaagatctacgagcgctgccctggcatgggcggcgtcagcaatccgacaaacttcagtcaccgtgttcacgtcggctttgaccccaacactggcgcctttgtaggcttgcctccagagtgggagaagctgttgacatcctcggctatcaccaaggaagactacaagaagaaccctcaggctgtcatcgaggttctcgaattctactcagacatcaagatgcgtgagcagaacccgcaatactatgctgggatcaactcttcgcccaatggtcaacccaaggcatacggtagtagtgttggaagctccattgcacccccacgtcctgccccaccaggacctatgcagcgccttgatagcagtcagtcgaaacaatctgaaggttctatgcgctctgcgtcatcttccgtcggacaggcggaccgtgcggcagaccaccaacagcaagttgaccggatgaaggaaatagccgatcaagagcgtcgccgcgtggaggaggaacgtcgcaacaaggaggagcaagatgcttacaacgcatccatcccgaagggccgtcctactatggctcaacaggagcttggtggttatggcggcgacgactcgtcacagaatagccgctatcaaccaagccgtccagcccctcaggctccaggctctgctgctcgccagcaagaccgacagctcaccgcacagcgtcccgcacccgcgccaccgtcgcagagtccttacggccaaagcgcagcaccgggcgctcctcgaaccgatgaccagcagggctctccaagctcccgcagtgaccctcgggccccaggctctgccaaccgtccccagcagaacggttctaaggccggaccccctccgacacgcctaccggcccccgttcaagctgtgaagccgttgaatattgccaacaagcaaaacgggaccaagaacgtccccgatggcgttcgcctagccgaagccgctcttacgaagaaggcagagccgcggaaggaggtgcgcatgtcaggcatgtcagagaacgaagtcatggagcggctgaggtctgtcgtatccaaggataacccgaacgagtcttacagcaagcagcgcaagattggtcagggtgcatctggatccgtttatgtggcacgggttaaggaaaccgcacctactggtgttgcccacgagctttaccggacgtatggcccgcgctgccaggtggccatcaagcagatggacctgcgcagtcagcccaggaaggagttgatcgtcaacgaaatcattgtcatgaaggacagccagcacccgaatattgtcaacttccttgactcattcttacaggaatcaagcaatgaactctgggttgtcatggagttcatggagggtggcgcgttgaccgatgtgattgataataacccagtaattactgaaggtcagatcgcgactatttgtttcgaggtatgttttctatccaatgttgttttttatccaattactgacgtttttaccaaaagacttgcaagggtctggcccatctgcacaaccagagcatcattcaccgtgatatcaagagtgacaacgttctcctcgaccgcgttggccatgtcaagatcactgatttcggcttctgtgccaagctcaccgaacacaagagcaagcgcgctaccatggtcggaaccccttactggatggcacccgaggtggtcaagcagaaagagtacggcccgaaggtcgactgctggtcgctgggtatcatggccattgagatgatcgagtcggagcctccttacctaaacgaagagcccctgaaggccctctaccttattgccaccaacggaaccccccgtctgaagaagcccgagaagctcagcaaggagctcaaggctttcctgagcgtctgcctctgcgtcaatgtccacagccgcgcttctgccgacgagctccttgctcatgaattcctgcagactggatgcagcctcgctagtctagctgagctgctccgctggaagaaggctactagctagtaaataactgctcttcacctgcacaacttgaagcaacatctggatcccatttacgcgcgtcctcaatttccattcacgcgcgccttcgatttccattctcacaggaaccactcttcccgtgtgttcttttcccgtcttcttcactgcactctgcattgcagatatcattgcggctctgttctctttacttaccatacaaccctgggcgtggataatctggcgtttgatctgttttttctttttcccctgtccaacttcttttcgatgcttgcacaaacacataccatgtttccccctatgacgttcacgattttgcaacttgcactgtatcatgtgcccttgcacaaaagcgaagaatagtttaaaatccgatgtgactttgacttgatttctttattaaaaagaatcaccgtttacgtgcattgggccctggtgtatgtaaccttgggctctttgtgccgtactcagccagttgtccaaaaggatatcaaacaaatacatgtcttcacataaccttacggggtcaatttcatacatggttcatcgcctatctgactccatatcacgaacaacactaatcgggtacttatgcctctgtccttgacaagacaatggggcttaggataatctaaataccgttgtatcgagattgatatcagagaccactaccataccatttttaatgtcaaatattttattgaagcccgccttgagactaccctcgagttaactgagagaggccgcaaatgcgaccaattatccttggatgtaatatgtcattgacaagcgtaagtaaaacgagtatataaaaattcatatagaagacataaggaacgaaagggaaccaagacctccaatatctcctccatccaaaaaaattcagttcaactcctccctcacaactgtaccgtacaaaccttgctaaacaagactccaacaagatcactctcgtcctcagaagccgtccaacggcccccatccacaagcctctgtttccaaatactctgctcagacgcagacagatcctcccaagcttgcagcatctcctcctcgaactgctcggactcgtccgcagatagagaagcagcagtctcaataatcacactctgctcagcatcttgcccttcaccgcaccgaacgatgacagagatggactgcggagcgagggtttccaggtcagcgggtgcggcaccggcgcggtgaacgcggtccaggatctcgcggagggattcaatctgcgagtctgtgggaccgaaggtcgccactgggatatcggtatcactgccgcttgcgcgcggcgcaagaagtgtatcgaaatatgtcagcttatcccgtgggggtatgacgtattcccttgcgatggctccgcggatgctgtctgggagccattctgtcgcaccgaggacaggcggggtaccgccgcggatctcggcgaaggcaagcattgctacgcagattgcagatattgagaatagtaggatgatgatgctgtatactagttcccagatttcggcggggcctggggtgacgaggacgtagcgtggggtgcgggaggaagttgggaagggggatagtgggaatgtgtgtacgacgactgtgttgcccatgctgacagaggcgagctttatgttctgcgggccgacgtctggggttacggggtgtgccggcgcgatgaaggtggagaaggtgagttttgtcattgagaatgggtgcacgtcgcggagggttgtataggggcggaaagtactgtagccgcggtttggtccgtattccaaggtaaatatagggatggaattgtcgctgccgctggctgcgataaccgtttgttgttggccttgcgggtttgttccgagttggcagatatcgattcctaggccgatcttcactgttcgagggagcttgcgacgtcgtagaattttggacttgctcgatttggcattagggagttgaaggaggacgagctcgctaccaccgcgatttggagcattttggaggagaagcagggttctaggcgagaggaatcgtagcgcgcggaacttgggacgtgctgtgcgggctccactagcgggcagaggaatagtataaatggagcggacctcgggggagctgttagaggagatctcgccaaccatgacgtctgagccggtggtatatgccacaaggaaccggccgtgtgcatcatcggtcttgcccaagtcgtcttcgagcttgacaaagtccaggtcctcggcctcttcattgccgcttaattggatgcggccaatgatatccttctcactgggcgtctctgtgacgcggaagaacacaatctcgccggacggtgccatacccgttgcaacggctccgatccgtgcgtgtttctcagcgccatccttccctttcggccacggcgagagtctcgtcactcgctgatatgtatctgaaggacctggcccattcttccctcggaagagtgatgcttgcgacaaagctatagccttgccgggaataacctcttccttagacttggtgtcctttttcgcctcatccttctcgctgtcttcggcgctttgtgtggtcttccgtggggcctcaaaccggaatgagcgaaggtgctgattgttattctttttctgttgctccacagagctatttataccggccagagcaacaagcgagcccgcctcgtcgctggccagcggggccgcagccagcgaggttaccgagtcttcatcgcgtgataggttcaattcgacgacttcagtgatctcatttcgatgtgacgtgtcaagcagagactgtacataaaacaacgattagcatttgcagagggaggatattctcgaaatggtgaacttgcgatcttgtttccaactccactacgcccctcgccgcctccgccaccgactaggagtcgaccgttgttgcgcgggtcaaagtccgcagcgaagagcggacacgagagtgtcaatttagcggagtatacggtgggcgccattgttgtcgacaaaacagagtgtaaagaggacagatgggatgacggaggtgccccggattcttggcgcggtaacccgggattgccgcgcgaaaactatattgtatagatctacaaagataggactactactctattttagttggtatgggaagaagatgagacgaaaaaaaagtaaatagtattttatcatgcactctaagcattttaagcctcgacttcttgagaagtgaactcgggcaggcgcttgcggatatcctcccatgtctcgtcaccctcaacaagtgacttgacagcctgcaggatgtcatcctcgctggcacggacctgcttggtggtatcgcggtcgcgcagggtgaaggtgttgtcttgaacggactggaaatccacggtaataccgaagggtgtgcccaactcgtcgttgcgagagtaacgcttgccgatactggcggaagagtcatcgacacggttggagacaccggccttgcgcagcttcgaagtcagacgctgggtcagaggcttgaaggaggcgtgggtggagagaggaaccagcaggaccttagtgggggcaactgcgggagggaaagaaaggacctatagagtatcagtaccagcgttcatgtgaaaagaatgcaaaaaggaaggcttacaccacgggtttcgtcaccggcacgggaccagtaggagtgctcaatgatactgtaaagaatacgtccaataccgaaggacggctcgatcacattgggggtgtactcgcggacattctcaacgcgagtgcgcttctcaatcttgatcagatccttttcgatctcaaccttgccagatccaacaccctcaacatcgacctcaatcttgccgtccttctcgaggtcaagagacagcttctcgcgcagctcctgggacagagcctcaacagccgcctcgacagtcttggcgtccttcttgaatcgagggccaaacttcttcttctcaagttcaatctggtactcctcgatacgcagaggctcagcacgggcttggcgcaccacaagaggggcaccggtcttctcccggtggacagtcagatcataagcggagcggtcagcacaaccgacacactcaatccagccgtagctggtcagcaactcggcatcccagcagtcagtagcgtagtgagccatctcattggccatgtgctgacggaagcgcagcttggtagggtcaacacccagcttcaacaggaaggactgaatgcgggccaagaaatagcccaaagtctcgttgtcgaccaggccagtttcaacagccttgccgatggtcattttggttagctttgtgcttccggacagctgcacgttacggtcaagcaaggtcagctcagtatccttgacctcatcgaagcgagcgtgcttcttgccaccctctgggtcgacgtagtgctcaatctcggccatgaggaactcgcgcacacgcaggagaccggcgcggggagagatctcgttacggaaggacttgccaatggaggcagaggcgaacggcatcgactgctggttgaactccaggagcttggcgaagttcaggaattgaccctgggcggtctcaggacgcaggtaaccgggcatgttggcgctagggccaatagtggtctggaacatgaggttgaaggagactggaggcaacacctcgccgccggtgacggggttgcgaatgtcgtgcttcttgatgagctgctccagctcggggccaccgtagttgtcaatttgtgcgagggtctcctcgtactccttgaccagagcatcatccagcttcttagcctcggtgcccttggcctttctcttcttcttggcctccttctcctcgtccaccacaactttctcgccgcgcgcctgtttgtctcccttgaggcgggcctcgagcacctcctcaaccaagtggtcagcacggaagatctcgccagtcttagggtccttgcacatccagtcggcgaacttgtccacgtgcccactggtcttgagaatctcgtggggggtcaacatggtggtgtcgacctcgagcatgtcctcctcgagcacgaagtgcttgcgccacaagtcggtcatgttggcgatcaaggcggttccaggtgggccatagtcatacagaccagatacaccaccgtaaatttcgaaggagggggtgtagaacatgcgacggcggagcatggagtccagcaccgtgcggtcgatagactggccggtcttggtgttgacggtggccatcttgacgtttcgtttcaagctcttcgggggaggggtgtaattcctgaactgagtccgaatgagagacggaggggaaagaaaagagcggggtggaaatcgcaggcgcggcaattgagtcatccactacgcaccagggcaaccctcaggcaccaccgagaggacaaaagacaaggagtatagaacgagacagaacgaccaattgggtcggtctttttctttttctttttatttattttccttctaaaaaggaggtctccggggtcgaatcgcagattatcgctccggggaaacgattgtccgaaataatttatttctcgacgatctttacattttccattgccttcaacagcagcactttaccctctcagctttcaaaaatgggtgtccctggccgatctggaccgcctccgggcgttatgggagatattaaaaccggcaacaagctgcgccggaagatgaaccatgtcaagcgcaagagagccaaagatgctgcgcgccgagaagagcgctacgctttcaagaaagaagaagccaagaacccccagttgaaggaagagcgacttcgccgcaacattcctctgactctcgagcggaaacgtgtctggaacgaagccgacaacgacaccgaagaaactggtctgggattgagcattgacgttgagcgcatcaagcgcgccaagaaagaagaagaagacgagctcaatcggccattggaagagggcgaggatgacagcgaggctccggaatcagacgctgagtcggtcgacagtatgctggagtcagacaacgaagaagatgaagatgaagatgaggacgaagaaaagggcgaagacaaagatggcagccgcggccggaagaaggcctctatccgaactgcgacagagcgtgccacaagtcctacgcagtcaacacgcagcacaaacctcagcctcgctcctgaagcattggccgccaaattccctacacttttcaccgagggacctccacccaccccgaaaatccttatcactaccggcctcaactccaccctccacgaccaagccgaaaccctgaccgagatgttcccgaacagcgtgtatatccggcgtaatgcccaccggtactcgcacaaattctcagtccgtgagatttccaaattcgcggcaaaccgtaatttcaccacagtcatcgtgttgaatgaagaccagaagcgaccctctgggctaacgatggtgcatttgccagtcggcccgactttccacttcaccatcagcaactggatcgacggaaagcggcttccaggacacggccgagccaccgagcactggcccgagctgatcctcaataacttccgtactcctctgggtcttctgactgcccatttgttccgcacacttttcccgccccagccggatttcgaaggccgacaggttgtcactttgcataaccagcgtgattacattttcgtccgtcgtcaccgctacgtcttccgtgagaagcgtgagactgagaaggctgtcgtcggtgctgacggcaaggaaatggtgggtgctgagggtatccgtaccggtctacaggaactaggacctcgcttcaccttgaagctgcgtcgtgttgataagggcatccagcgtgccagtggccaggaatgggaatggaagggtggaatggagaagacgagaactctgttccaactgtaaatgtctctttatgttgttattcggttttgcatggggttcgagggagttatatccaaaagcttgtctggtttcattgcaatggactaaatttacttataaaccaccatgaactttatactctgaaggtcataagaggccacgtcggctctggattggttacttgcacaaatacattcattggctatccatacccaactccctaaaagtacgaagatggccaataatattttgtcacatgacatggcgttgctaacatctttgattcattcaagttgtccatccaagtgaccaacgagatgcattcgatggattcgaacattgacctacccaccgttgcggagattgaggcttcgactgatatcctcagtatacgaaccaattccattaaagtggttcgactgcgagaacgcttcgcggtcaagattggatacgcgattccgcctgtagaggcagagaacataaaatttgtcgcggccaacagcatggtttccgtgccaaaggtctatgccaactttgtcgatccagagaaccagaagagatatatcattatggatttcatccctggggccggcttgcaaaaactacacccgtcgctcatcccagccgagaagacggttagcaagcggatcaaagagaccttcgacgaattacgagcaataccatcaccggttggaaacttgaatggcatgccttacctcgacggtgttttggcaacgccagataacaacccagtgatttctgggccattcacaaatcaagaacagatgaatcagggaatattgaaaaggctgggccaaacgcaatcaccgcaccacactcgcttagtgcaaggaatggccgaccgaaccctcaaggaccatcgaattgtttttacccatggagatctgcagcggaagaacgtaatggtggagcgaacggtcaacaataatggagatgcagacttcaaagtgactcttattgactggaatttgtcgggctggtatcccgagttttgggatttctgcaattcgacaatatattgtcaacggaaaccagattgggttgagctcattccagacatatttgatcagtacccgttggaatatctcatgatgcaacttgtctactcgatggtcttttactgatgaacttaaattgcatcaaataacaaatcaagtcttgatcgtcaaaatagagtccgaggaactatataaacatccactgatggagataaacaattccttatccccgatatcagccaaccttggaagtcacgagacgatctcctgcaactgagccaatgacaatagaaaaaaaaaaaaagaatactaaacaaagtacatcatacccaaacaccctccctccctagaaatatggatatcctcccccggcgcctcatcttcatagcctcaataggcaatccaaagccctactacaacacccgccacagcgccggacacctcctcctcgatgccctaaaacccctcctcgaagtcaccctcccaaacacaggcctctaccacgaaacatggcaaagcccaacacaaatgaacataacaggcccgaaactcgtgcgccgactagaacaatgggcaagcgagcgcgccagccgacttgaacgaatcgccagcgttgccgcaacacgtgcctcgtcgtcttcgtcttcaacaaccccaaccccaaacaacctccccgcacaaaccacctacccaacaaccctcatcatcctccacgatgagctctccatcgccatgggcaaggtccgcatcatacgcggcgggcctgaggagtttagtctgcgcggccatcgcgggctcgtcagtatctgtgagacgctgcgcaagaaggggttgtatccccgctcgtcgggtgcgaaaaagacgggcaccgggccgttggcggatctctccatcttgcgcgttggcattggtattggtcgtccgtcgtcacatgatacgggtgctgtttcggactatgtgcttgcgactgttaccgataaggagcttaaggcttatcaggccgctgcgatgccggtggtggggactattcgggatgagcttttcagacctgcagggaaggtctgatgtgccaatgtgcagagtgcttatggcccctcatgattggttatatgcgcagcgaaggcatggaagtgaagaaagtaatgaagagcaatgtcaaagttggctcgtggatgtattaaccatatacatagaaaacgcctggttgaaaacaggagatagctgccgatgttttatcgacaaaagcaaagaaaaaaaaagacgccagtctgtggcgcagatctcagcgcagcaaatgaacatccggtattatgctaatagagtagtcgattcaaagaacaactcaaacggttccagctatgctcaaatcgcgaatctcctgcaacacctcctcgacccggttatccagatcacccttggcatactggtcacgagtctcggcatcgagatactgctgcacctgcgccatgcgggaataagcctcggcacagaagcgcagctggatcttgacgagagcttcgaagctggggtcgaggtagggcacacggaggtcgataagctgggggagttcgttgaagagctgctcattcagctgctcgtaggcctgcttggccatctcggcttcgcgctcggtccgcggcagtttggtgacatccttgtctggcttctcggctagcttcttgaccttggcgcgcatggcgtcgtaatccagtagcttgtggttgcgtttcttgatgcattcgttcacgtcggggaagtaggcgcagaatcgggagatggggtcgaggacggtggtactgtggattttgtcagcaccattcatgtgtgctcgttgatgttagtgaaaggatctcttaccggtatggtccatccaatgccttaatggtctcggcatcaagatcctcaacggcttgcttgtagctccggctcacaccgtcttttgttcccgcgtcgccatagaaggcatcaatagtctccgcaatgcgcatttgggacgccgtcatggctaggaaaagtcagccttgaacaagcagatctaacaatccgcagagcaaagggcacccacctcgtagtgaatcaagatacccctttgcctccttctgcaaccgattggcagcagtctccatagtccggtaacgactacaacgagcaacgtcagttccattccagtcccagtataaccatccacagatagcagcaatgacaaccataccgttcctcgatctcataatcgcgatcattcgtcctctcgacatgtcctatacaaccaccaagtcaacacaccattcgcatccacgtgggcgcggcaagtaaatcgtagcgcgtagcgggtatctcaatccgggatcgccctcatctcgattcattgcggggtagaactcgaacaaaactcacccgtcttcatcatcacctgtgtcgtcgcacggttgacatttttcttgaaccctatccatccacacggttagattcgctcacacaggcaccggttcatgagtccgagatgttgtaggataagaggcgtacctgcccaagacatggtggcggtgttagttcggaggatccggagatgaagatcggctttgagttgagtgtgggttataggctgtcagtgggtatgaaatagaagcaagtcgtatatgatggcagttggctgcagtcgagaagaatctccgatgttgaactgtagggaaagtcgtgaaggtcctggacccaatgccaaggtagccaacttggtctgccttacggatgtggctgtgtgtggctgagtgctgatgattatgtcatatcgtccggatgcggacacgtcatgtttggtagggctggagttcgacggagtatccaccagcgttgcaattcaggttctgctaggatctgtagtatctctgtttttttgcagaagatccacgactggtaatacgcggtatatcgtgccaaggtatggatcgaaatattgtatagttaactataggtagtatcgagttgtgacattcctactcagatcgtgtgcatatagccgcttacgctagtaggcgagcattcaagagggagataataataaaacccattttagcataattaccccttaccccttaaacagcgccatagttagtgtaaggctgggtcttgcatccgcgacaatacgcctgcatggcatgtgcatatcgaggtattcctcttatccacttcgtccacttcgcctacgccgtaatgctgatgcctaagtaactgagttatgtgttagttcttggcggacagctgtatgacaatgccaagctcgaacaaatgcattttccgtctgctcgagattttactcgaaatccattttttgggttggttgcttggattgggtatctgggtgaaggaagtcgcatagtccgaatccacctctttagctgcatgtgttgtatattaccgagttccatacggagtaactactccgtacagacccaaggtatgtggataattagaagttataaatgcatgtgtgaataaataatcaaaggttggacggagtacatagaaaaaagtacggagtagtttcaagtctttctctgccgtctaccttgaaaacttagaagttagcaggtagaggatatctataaaacaaatccatactatatcgagccaactggattggtcgtgctcaatggcagaggcggtaaacgcggccaactattctcgtgtgattaactagttagactgcgctagtctacaatatgacacactcgattgcatcagaccgctgggccttcttgtttctcgctagcgtatggaggatgcatgggctattatcgttgatcggaaaaaacctccaggttgaatgatatcactggccctggtgtgttggaaagataccggagctaatctactgcgctgtgcggatcgcctcggtgacacttgtggaccttgcatcgggtcgataaggcgccgatcttcgagttgatgtcataggtttttgtagattgtgaaactcggaggttgagtagagatgcgttttagttgtaagaggggaaataggaccttgaaacgaacctggtatgggataatcgatgtgcaccttgctacgtagaagcaagtcacatataacgggaattcaaaatgcctaagccatatatacaaaaagcgtcgataatatgtactagaaatcgacgtcgaaatgagacgaaaagccaaagcaaaaaggtccagatgacctccagtataggacatcccacttgggtgccgattcctgttcctgatgctgtttcagcagagcctctgcctacaatcatataaacaccagaatccaggatcaacaacccaggtcagaatatacccatcgcccgctaaggctgggttcgtcatagtggtacaagggaagaaagattcaaatgggaatttcccgccaacgccgtagaaactcgaaggtacctgccaaaaaccccgtaacgcgaaaaaaagaccggagatgaaactccgaaagactgtaaaggaaaccggatcaaaagaaaagggtcatgattcttcgttgcattgacgttgaagacatgaggatccagacaagaagacaagctaaaatgtggatcgatgtaatagaggacaggctgaagaggctggagggatacactgtgaatgcgccggagccaaacaggataaaagaaaagaaaggcaaaaaaaaaaaccttcgttaggggcctccttctagtttaggagcattcaaaggattaaaaatcagtaagcctctccttgaatgggtctataataaataaccgccctgtgatgcaaatggaaaataatagtttcggacacatcaaaccttacggtgcgggcctgtgacctcgacacctgacaactgtcgtgttgaaacgatcaaaacccttcctcgccggccttacacagcttgatctggcgcacccattcggatttgaggacctgtgaggcattgatgcggcgagaaggattgggatcaaggatggagtagatcacgttgcgacaacgagcctgagaatttataagtctttgccccggggccgcaggagggggattagctgttcttactcgatgtaacgtctcaatcggagcgtatccatcttcatgtttacgaccgtcaaggtaccgctggtagaactcgtcttcatccttgcgtgccacacgccaaagatgccgcccggtgcgcatggccatgtagatcactccagtcgcccagagatcaaccgctcggggatcgaattctttctcgacgtattcctctggggcaatatagggggcggagccgcagagtccggcggtcatatgggcttccttctcccaggccatacggaagcattcaccattaccaaaatcggtgatcttgagtgctccgtgagtggtcaaaagcaaattttcgggcttgaggtcgcggtgtgcgacacccatttcatgcatatactcgacaccgcgcatcaactgcttaaaaaagcagtcggcttcggcgacttctaatttgccggcagcaaggaccaaggtgtacaggtcgccaccagcgcagtactccatgacttcacagtaatctcccttggcatcttgcaagaggtccaaagtgtgaatgacgttcgggtgacgaagggaagatgagatgcaaaattccgaagtcagacgtttttgatacttcttggtcgtttcttgcggccggcggcggaactccttgacagcatacagctgttcacatttggaatcttgggggtcgaccttgtgcgagatgcgcacgataccgaaggcaccgcggccgacaatctcctggcacttgccgtacttgtcaaccagagacgcggtggcgttcgggccacccttcttatcggcagccagcttatcgcgctccgtcttgaactgatcaatccaagtcgacatcagcgacagctgttgctcatcggcctggtcatcctttttccggctaccacccatcatatctcgcaatagatcggtgagcttctcttgccgtctagcacttctgaggttgtgtacatggttgccgagagcttccgacacaacctcaaatcgcttgttgactaaagctccatcttttgtctttttctcatccattttcttcctgtccttttccacgggctcgctcttgagcgagggatttcgtgatggtgttcgggaattttctcctcttgatggaggtctagaaggcggtccggaggcgggttgagacggtggtttcgaggtcttgccgttgataggctggatactttccacgctactgtcggatagttcccgcggcacgtcgttattctctttacttgctgtgtgtttcgctgtggttgagaacatgcgagtgaggcgagcggccatagtagctttagtcggcttgccggcggaagataatgccggagcagggagagcgtccccgtttgcgtgggcagccagattcatgcccgccagggcgcgtgctaccgaagcatctccatccggagggtcatgcgaatgttgtgaggctgcggcggaagagactgcggaaggcacaggtgaaggggaaggtggagtcatgtgcggtggatcgacaagtgaagattggaataatggggggtggacacaagaattctccggccccaggatggaagacgagcttctacagcgcgcacgaagctgcggcgaatcgaagttgtcttaaaggtaaggatagagagaagtaagaggaggcgaggcgagagaaaaaaaagtaggtggcctaagatggatggcctgaggcaacaagggcaaaaggtgacgacacaaagagacacggcaaatattggaagtaccacacaccagaatgatgcccgctggcaacgaggagcccctagggtatatagacaagcaataaaagaggagagagaaaagaaaaattaaaaagaaagagaagcaagtgggaaataagtgggataaatttggcgatgctagagaacttgaaatacgacggggttctttttggtatggtaatatattacatagttaaacccataaaaaattgtaaaattcaaatgaaattgaaatataaaaagtgaaataactcgacaactccaagagaagggggaaaatgtgggcactgcaacggtataggttaccctcgaggattattaatgcttgcaaatacttcgttatggtcttgacctatagggctacatagtgcatcctgcatacggtgactccggcgctgtgagacctaaccggtaaagtcgagccatctagagacatctagatacatctaggctataacatatttcgagatatattttagttgcacacacattctttaatagtggcgtacattttcatagaggaaaggattcccgaggtccgttccgaggctttagtactgatttcttttggtgagagatttaatggtaatgaaaccgcgaagtaatccaaagtaattaaagtaattagtataataaagtcgagtaacgaaagtacaggtttttttttttcaagactggaactgggtctctgccgcgttgagaagcttgatacatgtacggagtatcatattattttctcttcactggtattaatgacgttgggtaaggtgacgtcctcctgtatatgtgcactcattcgctattcaacggacactgctatcgctactacaatttacaacgttggaaatacagaggggaagtagctttgatagttccgccaccacaccaaaggactgaggctgtgcagtctgcacaacgaagcccagtcatgattcgatcaggccccgcaccaagccgacacgctgggtgcacttgtggcggttgtggttatcccgaggccctgtggacttccgatgtatgaggtatccatttagatccattcatccgatctaattggggggatactgttgatctattagccggagcatacaatgggaatattttagacgtgctttcttactgtatatggtaggtgggggattatcatttgaaagttgtacttagggcatagctgtatgtgatggaagaccatcctcttacttgacgaggtactacaatacaaattcacactgtatgtaaatcgaatccaggtaaccccagttctcaaaggacactgtcctcgttggctgtaaatcctaaatcccctgtcaaccaattgtcagatccctccgtttatacccgtgctcactcgcttctttcattgtccagctggtcaactcgatcattccgaaagcaaaacaccccatttctggaccctacttcctgccagtgatggctacgcgatcgctgctacgtaataataatagtcggtcaatcatgcactcctcttcatcggggcgaggaaaccgcgtgggtctctgtgcgatggagaccccccgcagcgatgtacaatgtacataatgctctagtacgttataggggaatacaatagagactaaagtagctttccgctatctagcgtcattcggacaaatgatggcatttgggatgggcctcggggtggtacaggttgaccaatgtccatgttcgactgtttcaatttgaaacgaatagaatacaatatatcgcctttcttagccctatgacttctgcacgggaatatgtccagccttattactttggaatgtggaatgcggaatgttcaccgtctcttcggatccctggtgtgtccgtgtgggggcaattcttgacagtgtcttggatttccatactagcatgagcttcgcactgaactcgggcttggtttcggagctagtacggggtggtaactagcggtatactcaataatgttattcaatggctggttttaccccggattactggcgatttccgaataagccccttagtgctgacctcggcacgggacacaggaagaagaatcgagtcagacgttctgctgcagaggagcaatcaagtgaaaatgaccgtttcaatctcatacgtaacgaaaaaaacagcatttccactttctcacacaagcttccgtatccagcactaaccactacgaggcattttcacccaatcacagccctaggaacccatctcaatttcccacagcacaaagttactagttatgcatcgtcgacgtacaacggacaatatacagtactaagccttctatatcaatattatatgcagctacagatgtacttctataaacaagcctttcactactacccctcttcatttcaaagcggatgactatttattctatgatgctcttgctttcatctcttttagggtttcccctcacctcgcaaagcattcccctggttagatcttggtgccaatatcgagaacaaagggcaagccgagcaagatgaattcaacaaataagattcaagcccaccacgggttgaacatatttctatcgttcatagaaatcgtttcatattaaaattgctcccaagtacgccatatctctgaagtccaatcacttttgatagccagctaacagaattcagaagtgcaaatcagccttattattacctagccctggacagctatcctgatgtatgagtcgcatacaatcccagtgtcgcatccgagcagcttaccagggacagagagcttaccctgaattattcgaaggcaagaatcggcaatacaatgggcctctcttcactggaactgctagagcagcgtcttaccgcactggaaggacagtttctctatttccgtcggccaatccttgatgagtggtcaggtaatccgagaagtctgagtgaagtccaggagagaaataccgtagcacgcggtaatatcactatggacatccgagccatcgcggatatgattcaagaagacccattcagagcttagaaatgggaaacatcgtttgcgcatttctacgatatcacatacattgaggctaaagacaacccctctctacaccaaagtccccgccttcggcgattgttccatctaaatgcgaatgttcaatctttacgccggtttactcaacctcgagatagcaacttccagagtttacttgctagtctctacaaacattggatttcagagtggaaagcggacaactccattgagcctctggacgctatcatggcatacctgactgacgtcgacgcaaaagccatttgagatggctggctatcaatagattgacaggagggcttatcattattggggcgtatggcgtcgcccgagactgcggcgctgctatcttgcaaaatgtcagatgatatgccattatgaacctgacacaatagatacaaacttgattgctaggatttagcgctcaaattcatatgaagtgctagtcattcgctcgctgtcctctaccgcatcctcgcgtccagttactataacgccacaacactaactcgctcacccggaacgaacccgtagttaagacgccaagaagatcaaaagggtgcataccattaaggttatatgcgatgaaagcaaaatccaaaggcctctcccgtgacccctggtctacaccaatgcaagccataatccgctatccaatccctgggttcccattatacatatatatgatggcagaggccgggcctcctacagtacacaaagttcaaccctgcaccgaagtatccagggtatccgtatacgaacctttgaacgcggtggatcctaaacaaaagagaacaacctacgtcgcggcatacgtggatggcagatacttggcaaagcgaagatcccgaggatcacatctatccgataaaacccctgttcattcgaggcaggggtccgcgtccacgggtcggttcacatgttgagctaagtgcaaaaaaaagaacaaccacaaagccacccaacaccggccgcaacgcaaattccgattcaagccggtgcatgcttgaccgccagtctgtggtcgcaggaaagacacacacccagcctcgaacctataggattggtcggctttgcaccgcgacacctcacctatctcgcgttgctaaatggtcaaagctcgagataagctgttggcattatattgtttttatcctgcgtgcgtgcgtgtatgtggcctatgggtatgcactagtaactgcactacttacatttctatatatgcgctgcgctacgctacggagcagcagagctcgggtgaaaggggcggagcttgtctttgtgtttgcagctcttatcccgctgtggatgtacgttgtgctaaacctgtctgtgtggacgtctgtgctttggccaagtcatgcaggatgcaggatgtggacgatctgacctggagctgggagctgtctgtgggtatctgggttttcttttccgttgcgatatgcattgagctttgctttttcttggtgcggtgggtggaaaaagcaattgcgagatccaattagtgtcgtatgatctatcttcgaacttgattctcgaggctgcacctatccgctggtcagctcctccatgcagaagcagacgcacgagccacgttgggccggttgggaaagctggctcttggcggtgctgcttggctatagctgttcggattaagagtatgcctagcgctctagacccggatctaatttggactttttttatggcgttgttgtggctgcgggatttctttgatttatacgacctataccccgggtttattataaacaggcattttaatgaccggaaacttgtagtgagacaattcacatggatattgcgtaatatcagcagtaatccattcttccgactgtccccgaacaccagtaacaaatagctctgttcggcattcctagttcataacacttgatatgcgaagccgagctatctgcgggccgcccccgggccaactccgcactgtcatttccctagcgtacagcgtactagcggcgctggagatgccacgtgggaaggaaaccggtctcattgaatggcagtcacacatgaaaaagcggtatgcataaccctgtcgtgcttggcttcggtgctgtgttccggtaatctcatttctcgccaacgtgctgttgcatgcaggtatccgtatcacagtatccttgacaacgggcgagtccgctgcggtgtgtgccagctatgccgctctcacgccttcgagataccggattcgtatatgctaacctcgaaagtaccagcggtgagattctgtcgcatttcccttccttcacttagactttcgcgcgaactggcccccagatttcacgaggcatgcacagttcgatatcatgacagaactcgagtctgctaccagatcagaacacacaagtcaacaacaaaggcagcatgccagaactaaaatgtacgtaccacaaactgctccaatgattcctcgaataactcgttgttcacgcccacaccgccgggatgctcggtcggagaaagaggattcttaaccactaaacagaccgaaatatgtcagcactatccaaacctgccaaacgagatccataagccacacaaaccgtattccacaaacagattgatatagatctgttgcagcgcgatgcgcatgctaggactcttgaggtccgtcagcatgacaaacttggtattcgtcggtgtctcgtagtagtgaagcttgtattggctggtggtaaatgacacaaagctagttgcggtaagcatcgggtttgtccgtccgtctaaaagccagcaccccgtctggcttgcttcaggggcagtcttacttgtcttcttcaccccctagcttgcgcaccatattccgcaacgagaataccgtgccgaaaaccagcttcgaatcatcgtctgtcgagcgcactgtctggccgagaccggtcggcggtgcgtcggtgactgtgttagaccgggacttccccacgatggaggtcgggcgtggaagccagcgacgcttgtagatgcattccgctgaatcgcagttagtatatgaagatgaattcattatataaagcgtgtttaccatgccgatcaaagatgtagaacgagtagacgaccattgtgtattgtgtgacctgaaacaagttgttgttgatgttcaagggagttccaaggctgacaggcggtgaaatcccctatcgataacaaaagcccatatcaaaaaggagcagcctaggatttcttcggcgtttgcgattcgaccgggtctttctctaatttgacttccgtacatagggtttagtatcatttattctattcgcttctgtccaatccccgcaaagagggtctcgtaaggctgacctttcgcttcctacgtcgaatcccccgctcgaacttcctcattaccccacacgtctcctaccagtgcttgatgataagtttatttcaatggacgaaaatcaggcaatggcaacccctatgtcggatatctccgcagagccctctaccatctcactggagggggtgaacgatgcgcgcccccaggcgagcagagttgggtgagtttgactatgaaacaaccgcggaagattcattttcgctgacgccattctgcaactaggtcttctgcatcctatgatagcactgggaggcaccgacgacgaaacccaagagcaaggcgtccggtgaaggtcagtctctcaatgccgttatgacagcttcggagaactgataccgcggactaggaaacactggacgcccactccgagtattacacgagccaagacgacggtactgcggaacatcgcatcaaccaatacgtgatcaaacaggagatcggacgtggatcgtttggggctgtccatctggctgcagatcagtttggcaatgaatacgtatgagcacgaacttgcgggatatgctgggaagtggacatgctaactgtgagataaactgtctgtaaatttaggcagtcaaagaattctccaagtctagactaaggaaacgtgcgcagtcgcatctgctgcgaagaccgcgaggtccgattcgaccagggacggagttcaactcgccattacatcgacatccttccggtgacgataaggagctcggagagaatcctttatatctgatcaaggaggaaattgctatcatgaagaaactgcaccacaacaatctggtgtcattgatcgaagtcttggacgatccgacagaggactcgttgtatatggtgatggaaatgtgcaagaagggtgtcgtcatgaaggtcgggctggaagagagagcagacccatacgacgatgagcaatgtcgatgttggttccgtgatctgatcttgggaatcgagtatctgcattcgcagggcattgtccatcgagatataaaaccagacaactgtctggtcaccaacgacgatatgctgaaagtggttgactttggtgtatccgagatgtttgaaaaagattcaaacatgttcactggcaagtcagctgggtcaccagcatttctcccaccagagctgtgcgtggtcaaacatggcgatgtatccggacgggcgacggatatctggtcgatgggagtaacgctatattgtctgcgatatggaaagctgccatttgagaagcagagcatcttcgagctgtatgatagtatcaggggagatcccgtggactacgaagaagaatcagatgaagaattcaaagatctgatgcaacggattctcgagaaagatccagagaagcggatcgacatgtttggtttacgagtgagtcaatcgcaattgcactgcttgcccatgctgaccagattcaacaggagcatccctgggtaacgaaggatgggacggatcctttgctgtcatttgaagagaacacatcgcagcccatcgagccaccgacagaggaggaaatgaactcggctattacaacaaacatgggaaatcttatgaccgtggtatgttatattcctcgttcgatagtatatccattaacaaggcccaggtgaaagcggtcaaaagattcaagcgactaacagatccgaccaaaccacaatcccccattgaaagtacgttcggtaagagcattctaggcggcgatcacgatgcctactttgtcgagccaccaatggaaatggacccagacgaacccttcccggccgtgggagcggctccacaaacacatgatggccatgacttcagtgcaggagtacgcaaatacttcggccggcgaccttttgccggactccgagacgattccggaggtttcgggtctagcgattcggccagtttttcatcccggccggagtacagcccgaacagcagcaaaagacccagcggcgtgttcgagcccgagcgaaaagactccggctcgatccgcagttggggatcggctcaaccggatatcggtcacgaagccctgccccactctcaatcgggatcaccccatatccctctttcgcgagcaagctcgggtagaactaagcgcagcttagaggggacgagagggcatgcccgtgacccacttgaggaggaatttccctacctcttcattgggccatctacatacaccggctcctcgcagccggaagcggttggtacggaaattagtggcgatccggggtccattctccaaacgttggaacattcaatggatcattctgaccagatggaggacgatgagccggtacagttcgtcagtgaatcgcccggcgctgccgatttcaatatctacgaaacagcatacaggaaggaactagatcgcataaagcacaacctgaaagaccgcgacaccggcccgaaggtgtacctgactcgcgtcattgagaaaaacagcgacgaagtggtgaaactggccaaagagaaggagttggatcttcaaactgggaacgaatttactcctttttctctgccgagaacatccctaggcttcgggcatgccgttaacgcggtacgctcgcagatgctgcagaaaagacaggccggggagttggaggagcagggtggggagggaagtaaagatagaggttcctcgcagaaccgcgagcttcaccctcatcctccgaaacgtctgtccgtctcatcccaggctctacttaagcctgagccgtcttcgctcgaggcgacaggtgtgtcgtctactgaggggaaagattccaaggcccagctgcggcggattcttgatcgggttcgtgggaagtctgatggtgcagagtgataggaggtgttgtttggatagaattgtgtgaagcttgggttctttgtatcgagatagcgttatattcaaggcatatgcactgccttcagcatacacatggcaaacttttttgaaaggagcattttcgtgaattctcgttagaatgtgtgtgagagcggcgaccatggcgggcaccatcacgaagtatggcctgtgaaactctataaaatacagaaagcgcggttctagactccaaggccccgataataaaaaaataaaaaagtcatcgccagtatgcgatccggcaacttgagatcaaacggcactcaagctgaggatggatggacggggatccatagtggcattgcgccaacgtcgccaacgacaccgctaggccagatgtccgtccatccattcatacatagtgtgcagtgtaatctagcatacgtagtggactgatacactgtatgagtctgaggctgagagtaagtaccgctttccattatacgaacacctgcgtatctttctctcggttctgttaaccagaactttgatgcaaaatattaggaatacgatggtgtaaagatccagtttcgaaatgcgcctacattagcaaaagccatgtttaacttacaaggaataaagaatgaagaacgagaacaaaaggatatatgtgtgatattaaatactctgaattcattatagactaggacaaagagtgtaagacatcatcctataaggagagtcgagatagaagggaataaacaaaaaagccaaaggccaaatccaaaacagggagccaaaacatcatcaaaatatcaaaatcagaagtaggataaaatacaggttaaacatgccttaagcagaaaaattggaaggctcaaagaaccgccatcgccatgtagtagcaatagacataatgcatcatcatcgtcatcaaatgcatagcacgctagacattgggctgggctggagggagaaagaaaaagcagagagcagaaaacagaaggtataacatcgagatagaagataaaaagaaagatgctaggcatggagggcatcaattggcgtaaacgtcttgtattgtcttaggtcgtggggcttggggtaggcttcacaatattgagaatgtgtgcctaggagacgaatggagagcgggagtagaaggaaagcagtggaagtctcgcttgcttgaactggggacgcaatggtgtgaagattcaatcataggaaatcgaatatcaataatatgaaagcattatcttcatcgaacgtggggaactcgtggacgcatcgatggatgtatgaaggtcactgtcaaggggagaagggaaagagaagcatttctcgtcttgtggtctatctgaccttaggtagattgtacctaggttggcagacacatgggcaaaatgagagagtgatgaattgtcgaagggagaaagtcggaggtgttgaaagaagtcgcttgaagagcttggagaaaaaccgcgcacaataaacacaacacgagaacgctgtctattgttcatcaatggctttatcattcattcatagcccttgggcctcaaaaaacaaaggctgaaatcgaaagtcgaaaataacccagactgggatcgaagtaaaaatgagaatgaaaatgaaaatgacgatagaaaaagtatcaaaatcaaatggtcatcgtggaggtttctcggcttgagttgtattcgttcgttccgagtatggtgctggctggtcaggccgagtgagcgaatcgcgccgactactgtctgacggggagaaccggtctgctgcaaagctgtagggccgctcggctgggttgctgaatctagggaaggcgtctggagggcctagttgtaaggcatgtggtgaagggaggggatggaccatctctgtgggccggggtagttcacgcatgttgatattcatgcggggtggcatatcgcggcgctcgtcatttggcgcgggaccggggccaggtggtaggactgctgagtgcatggttggagtgtcgtagagagttggggctgggcttggcttgggtccgtgaaatgcttggggtgccggcgggaatggtgtagacgatgggcctgccgcggggctggtcggtgaagaagggactttgagtctgcgagaccaccctgaccgtcggggggctgggtaagtttcaccacgggcctcggctaggagctttcgtcgctcggtctctgctttgcttgggcgtcctcgtttacggggtggttcgccgggggcgacatctagtctcggggagagctgggctgatgcgccgctttcgctgctgtaagaggcggtgctggctggtggccttggttggattgcacgagggattggcttgtcggaaggatgcaatggccgcttgcgcatggtgctagggtccattggggctggtgggccggtcatatcggatggtggtgggaatgaagccactggctgtgttggagggtgcacgggctgctgaaccatattgagataggccgttttgcacgagctgagtgaacgaccttgaccggggcaggtgttagcgccatgttgatattgatcaagctatccttccctttctttttctttggccggcaattggacgataataccttgaggaaggggaatatgctcccagttgggagtaatcccatattctttgatcatccgtactagatagctggaaggaaatcccgctttcttgaggatctcggtgagtagagtgcactagttcttggtcagcatcacattcacatcggctaaagaatgcccataccttgtcctcctcggtccatggcctatcggatagattcgacatatccagaccatggaagcggattatagccggcttccctttcccctgaaaagaaaagaaatataacgtgaaagaaagtaagaaagaaaaacaaaaacaaagaaagcctcccagatgatcccggaaacaggacagcgaacggcgtcaaggtcgtgatacacaattcagatcaattgatctctcatatatgttcgagaggaaaagcgaagagagcgagagagaaagaattaaaaaagaaaaaaattcaatcaaaagacacgcgccagagaacgagagggtgtcttatgtccccatatccttccacgcggagacgaaacaaaagggatgacaagagggaaacgaatgatctgacaattgaaggctttgtagccaaagaaaatgaaaaaagagcagccaaaccaaactccatgcaaaatccccaatttatttttttttctgggattttttccaggaagaatttctagccaaacggacttgagcagccgggatcgcgcaggagaccagcgttcgggagggaagctgcagggacgatgctttctggagagtgttacagtacaggttagaagaatctggtaaagtatataccacaggtgaatagaaatgggggtgtttcagccgggccaagtttcatattgttttccagaagagtttcgaagaacgtgaaaaaggcaaaattaccactaagaagaccgggaagcggggagattggatttctgattcctccgaaagtacaatcgaggggttgaatggagtgggggctgcattgtatcgaacagatgaggtcttctgcatagggttgtatgggctgggaatgcccaggcaatataatgtataagataggcttagatctcgccgaattgcatcgttggttcgggaaacggttggccctggcagttccagaaccaagggacagtttgacgaagcgttatattttctttttttgggggcaattttagtgcatgattttggtttcgtcgggtcttctccagcaaagagtggaatcatggagccgagaatgggatttgataggtgccaacatgggcccgggacattgggacgccccaagaaaatgcagaaaatgcagtgaaaaatgattttgtttgaagctagcctcaggggcggttagagtgggcgatcgtacagagaaaaaaagcgcgtctgtcatgcagcgggttctgatgaaaatggggccagaacgattggcagagatgagccgagtggagaggcggactccgccgagatgcagccatgaggttcttggtaaaatacaggtaattgattaggggggaatggtgaagatggtggagatgaagaagatgaagaagaggagagaggatgaagaagcacgggattatatagaaggacagcctgaggcagggagccctacaatatcacatttgatatcacatcggtatcccatgcgtattgtgcctggtattatcaggaacagtatcatgatacagcgtatctgatgtgtaatccccgtaatctatgtcatccatatactaaaccagtttgaaacgcacagacttccacgttgacgaacaacacacatgcagacgcgccttttcctgctttctcctccaatcgatttcataactttcacgcttttggattttcttacatttccccttgtctggtctttcttcgtttccatctatatcactttaggcttatgctgaccttgaacaaccctgtcacagttcccgtgtggaaatcaccacataaatgttaaaccacaattgggattgaggaatgactatggtcactctcccactactctaccagaattggtccatgcctattccaggtatgctctttatgagcctgagtgggaagtgaaatcaagaccactataccataccacctatacaacatacaaccaccactggtgaaccgagatgattcaggtctatacaagacagtgagagtaggctcaaggcggtgagacaccgaaaatgacaatagcttcgatttcagtcaaattaggagatttttatcaatgagattgtttcttaccttgaccgctctggaacccccttgattcccgagggcatatcctggcagaatcgtccccgaacttcgtattctgctttattttcttcttcctcttgctctatctctctctctctctctctctttccatatcttccaatcgtagtccgtgttgtcatgtctgcccatggccacgcggactctgaagaggctcctgccaaaatggagcgggactctccggtaaacggcattcatttgaaaaacggcgagtcgcgtacctcatctcgatctcctctccctccgaaaaaagagtcctcccccaactccgacccatcccatacaatgaaggaaaacgttggcgacatcgttcttaaacgggaaccgggccaaccgctcaagctgtctcgcagctcgtcgcaaaaagtcgcgtcgcgacctccgccgctgtacacgcacctgccagatagcacccaggatgcgctcgccacctttgaacagatccccggctgtacctacgccaacaaatatatgggctacaccgaacatgccatggaatgtgattgcgctgaagagtggggtaagtttggttttcgagtagcctcgctgtcttcttgcccgattcccggcctgatggaacctccacgagcatatcactgatccactctgtagatccgaagattggtcaaaatatcgcatgtggcgaggattcggattgcatcaatcgcgcgaccaagatcgaatgtgcgggcgactgcggctgtggctccgactgccaaaatcaacggtttcaaaaaagacagtttgcaccagttgccgtcatcaaaacagaaaaaaagggtttcggattgcgcgcggaaaagaatctcgacccgggcgaattgatttacgaatatgtcggtgaggttgtgggagagcagcaatttcgaaagcgcatgagacaatatgacgaggagggcatcaagcacttctacttcatgtccttgaacaagggcgagtttgtcgatgcgaccaagcgaggcaacctgggccgattctgcaatcactcgtgcaatcccaattgctatgttgacaaatgggttgtgggcgagaagctacggatgggaattttcgctgaacgcgcggttcaggccggtgaggagctggttttcaactacaatgttgatcgatatggtgccgacccccagccctgctattgtggggagccaatgtgcacgggattcatcggtggacgcactcagactgagcgtgcgaccaagttgtccaatgcaactatcgaggctcttggcattgacgaggcagatggttgggataccgtggtggcgaaacgccctaagaagaagaagatggaagaggacgacgaggagtatgtggacagcgtgcagcccaagtcgctggatgaagatggtgtgaccaaggtcatggcggctcttgttcagtgccaggagaagtggatcgcggtcaaactgctaggccgtatccagcgctgtgacgatgaacgcgttcgcaatcgcgtggtccgaatgcacggataccagatcctgaactcccagctcgctcaatggaaggatgatcagaacgtggttctgcagatcctgaacatcctcgacgggttcccgcgactcacccggaacaagatccaggactccaagattgagacgaacatccggccgttgacgacctgcgatgatgagcgagtcgcgaagaaagcggccgcccttctcgagagctggtctggtctggaagtcgcctaccgaatcccgcgcatgaaacgcggcaaggacgcgaagcaggcaattaaccagttcgagcgccgcgaaactggacaacagcagcgccagcgatctcttactcgctctccgtctcctgtgtacgatgctcctcgtggaccagtgcagcaacgaagagaacgaggtcctcagcggtccagacaacccaaccgtcgtggccctcggccattgcccgagggatggtatactgcggaggcggatggccgcatttactactactctgcatcagggaaaaccacatgggaacggccaacgttgcctgctactcctgttactcctgcgccaggtcagcctgctaaaaatcaacagaacttggcattgcagagtatcattgatgggattatgaacacccaggaggacacaccctccgagcaccgaactgatacgcccgtcactcctcggccttccgctgatcaaccggagaaaagacataaagatggagagaagtggaggaagcttccattggagaaacagaagagaatctacgagaacactgtgagtattcacgcaaaacacgagatataactagactaacatagcacagcttttcccgcatatcaagcctgtggtggatcaatacaagcataagatccccgaccatcatctcaaacgatttgctaaggaggtaagctcatggtcctcccttcgattctttctggtgcgatttcaatttgctgacatcctcattaatagaccgcgaagaagctcgttgaaagtgattacaaaaataatcgcgtcaaggaccctaccgcgaagatctccgcgaagcaccagcaaaccgtcaaaaattactgcaagaccttcttccgcaaggcggcagccaaatacgtagatcgcgagaagcaggagggcgagaagtcgcaggacgccaccccaaaccccggaagcgaggttcctagcacaggtgacgatgaagctgtcgcgggtgcgtctgcgagttctcccccggaagacgatgacgcgtctctcaaacgcaagcgaaacggagtcttgaatgtcgacggtgctgaagaaggagccgcttctccctcgaaaagacagaaatctacacccccaccgcctcctcctccgccccctccagcagatctccctaaagaagatggtgatggtgataccagcatgggaaacaccagggacgcttcatctccgaaagccgagtcgggcgctggagtcgacgttgccatggaggtataggcaactcctgcgcgtcttgtcttattttgtgcttctgcatcaatacccaaaagcgagtcaaaaagcgagagaatcggaagaaaatggagggattaaaactgatatctcagtaacctacattacttttgcttctaccgtgttctttttgtgccttttttacctttcttatttttttgctttctattgctttctatgctgtcgacaatacccccgagcccaagtgccactatcatagtttgcatcaattcagcccatcttgagctgtaagcttgtcttttaggagatctatacctctaggcggatatctaaaagtccacaagactaccatcatgatcgatatcgatatgctcaagtgtcaacatctatatctcgattaattttagaaaatctttttgatactacacactccatccatcatgcataattcattcgagtatatgcaaagcacaggcattacagactcccaaagaaaaacccatcagaccgaacagagagcagagaacacagagccgaacaggggccccccaaaaaaaccaaaggaattttgccagtaactttgaaatcaaaaaatcattccagcgtgaaaataagaacaggaccatgtaccgtaaagagctcaccagaaaaagttgcaagagacaaaaatctagtagaaactctccacgatactatccttattgacaccagccccggcggcgccgccgggcgccatctcgccgagtcggaacacggactcgataacgctcagctcagtggctgtggtgtcgaggccggtgatggcgagccagtcgttgacgaccatgccggcgccgacgacgggggagccacggttcacactgccggccacgagggggacttgcaggagcgaggagagctcgtcctggtcgcggattgaggtcttggggtgcacgattccgccttggtttgagagggccatgtacgagcctgtgaggacgttgtcggctactgtttggcggaagacttctacgccgaggacgtcggcgatgctaggaaagaagatatgttagttttggaagaagaaaaaaggaaggaagtttgggatggatgaatgcgttatgagggctggactcctactcacatctcctcagtctcacgctccagatccgggtgcacgattgcgacgtggtcgttgcagcagataacattgccaagcgcggaaaggcgctcttctatgcgttggattttgacttcggctggaagcgtgttgcgcaggtgttgcaattcttgatctgtggtggttgtggggacgaggagacctttgcggttactagaggcgagatattattagcatttgtgtttttcttgataagttttcctttcctgacaggaaaaaaaaggctgttcattttgaactagctatggccgactcacccgacgattagacggccgacaatgcgggttccggcgatggttgcgtggcagatgggaatgacatcttggagttcggattcgaagacactgcatttgagtgttagtggtagttcctgagtggattggggtagaggctagggattgagattgagatttgaactggcacagcattggcagtgtctggatatgccttagcaccacccttcctatccatgccagtcccaagtcccaatctcacacccttttgaatatctgaacgacacacctgtagaagttctccgaagcaccaaccgcaacgatagcgtaggcatttgtcaggcaagagaaaacgccgaccctagaaggaaaccgtcagccgcagcccccgagcgttcgttctttgcttttgggagatcctactcgttcgagttctcgaattgcgcgcgaacagccataatggttagagtatcagaagatgttgcaaagagcagagtgggaaaaagtgtgcggtgaggagcggggtagcgaaaagcgcaaagctagcagatgcaagatcaacaggaacggaaactgtgatctagaattagggaattcaaggatcgagtctaagatttgcagaatgaagccgagataaataatttggcagagacgtgcgatccaactgaaaaaagaacaaaagctcgagccaattagaggcttcgctgagtttgccccgccggagccgcagaggcgagttggtgggttggaaatatgtaccggtactcattttactatgggacaaattatggtatactatgtaccgctacttaatttatactgactcattctgtctcatcttgacggtgattcattctgcatacaacatagtctaatattccaaggtttactctaatatcagtcatagctacgcacagccatgcacagccacaagaacaaaacataggcctggctagaagctagaatatggctgatgctacagcatgtcaaccctagtcatcttactcatccttgctatagcccagataccgaagtgagaaatcaatctaaatcatcaaaagtacgtattggactagatctcgaagggtcactgcgcacgcgcgacattagaggaggcctaagcttgcgacttgccagttcgattcaagagaacgagtgcatcttcatcaagatactaagtacagagagaggaaagaagaaaactatctacaggctgcattctcctggttttgtgcggtcttcttcttctgcaaaccatgcaaaatatggaagctcgcttaggttcccttccaatcgaggaaggagcgattctcccagaagcagaaggtacagatggagtacgaggccagatcgtcatgcagctgactacctcgtacatgtatcccaagagttgaccgctcccaaagtatagccaagccggcgcacagaactgccccctctcttttatgatagtggcagttttcgtctttgcgcagttggacccgcctccattgcctttgtaatgtgtttttgcaagatctggatagtgtttgatgtggttttcctgacataatttgcaacaaatattcatcgccgaaagtagccctagagccactatgctttttctctggagttgctggatttctttctgccgaaaccagagatcaggagattctggtgtatacgttgatattcgcgtcatctgttcgcgggatggagacgccgaacatcaggctttcaggaagcctagtccaggcattgaccaatagaacgaatggaataccaacagcgaaaatggacatggggatttgctcgaaggaacttccgaactgtccatgcacaagcgcagcataaaatgctggcgcaaggtatccaaagttaactatgagaagaaagctatcttcttcgtcctgtgatatgataactctgcctctaccagggtatgttgcagagccagcatgtgtttcttgtgtatcatcccgataccagccagctagtacctgggcagtgctgccacgaacctgccgaagggataaacccgccgccaagatcctcgagtctgaagggtagaccattcgattccgcatttatattcttcctccggtatagcatggaatcgagcgggagattactccaattatggagttgtaggactaggaggcgaggaagagaaaagtagctatatcgatcaagttctcaacataggcaacctctgcggcgaaaagagccatttgctttagcgacgacatctcgatgaatgtctcactagtagtaggtgcatcctttctctttcctctggtttcctcgggaaagccatccatggctcttgcgcagtccatatcatattgccgtgttgatgagttacttctttatatccgtccctccaggaattccaggagaatatttggcgacttggtcaagtggtattggaaccgggcaccgaaggactgggacatatctttccagtcacgcaggagggcgtgacatcaagacgttggacaaccgagcttcctttccatgtttttcgagcgggactgcgtactctaaacaatgaatcccattcccaagtatttgattgtggtggccatattggcctaggctctgctctgagttgttggacctcagctcatggttgaatatagcggggaattccatcgtcgatgaatccagttttatggttgattggcttcgtctcgggagttggattaatatttgtatatagagtagcagagttccgcatggcttctccagatagtctgatcgatccggcttgatgatggcccgttctgaaaaccaaggggtgatcttaaatccattgtcatcgatgatttggacttggattagagccatttcgcatactaccgatccagaggcaaggccgacagaggcaagccttcaagatctgcatgcaatagtggaatcaatccactggttgccgtcatcatgctcctcaaaccagtttgtaatagtgctggcatcgacttgaagtgaagtgcctccatgagaaaaggtctcgagaagtcttcgatggctggtgggtttttgtatatgaggagttatcggcacatgcgagagaagtcatttttggaagctaagtttgtctggtttgtgtcgtagacgtaaatgatgagtgaaagaagtgaagggggtaaaaaaggtgaaagagaagaaacaagtggaagaaaagaaagaggtggacaaagtggaagtgagatgggataaagaactcccagtcaaaacaattctggcgtcttctctaattaggacatcccttcgatgaactctctcttgacttcatttgaatctctcacttttctcacttgctgcttactttcactttactttcacttcagatctgatctgttttgatatcacatgtctcttactctttccttactacaaaacccattcaaacgagaaaatgtattcattctgatgccctccccccctatccccactcaggggggaggacatcgcaactaaacgtacaaaaaaagaattggtatcaactgcggggaacgctcacaaacatcttggtacaagccggcgggtctagtacccgcgcggcgggggcggggggggcgcgccgggcggcggcggccggtagtatcgnnnnnnnnnnnnnnnnnnnnnnnnnnnnnnnnnnnnnnnnnnnnnnnnnnnnnnnnnnnnnnnnnnnnnnnnnnnnnnnnnnnnnnnnnnnnnnnnnnnnnnnnnnnnnnnnnnnnnnnnnnnnnnnnnnnnnnnnnnnnnnnnnnnnnnnnnnnnnnnnnnnnnnnnnnnnnnnnnnnnnnnnnnnnnnnnnnnnnnnnnnnnnnnnnnnnnnnnnnnnnnnnnnnnnnnnnnnnnnnnnnnnnnnnnnnnnnnnnnnnnnnnnnnnnnnnnnnnnnnnnnnnnnnnnnnnnnnnnnnnnnnnnnnngtgggcccgggtgggcgtgggtggggtgggggaggagagcacggtggtgcgcgccggggtcagttcgcatcattggcagatgttggggcatgggctcggtcagagccgcatctgccaagatggaaagtgcccgtgggtgcacggggaaatcagcgctgccatcgtagctgacgaacttgccagctgtctcttgctctcggatgaaggaggctgcattcagcatgccgttgaaggcatctttggcgcacatgcgcagggcatcttcgtcgctgatttctgtttctgctggtgcgatctcctcgttcaggcggcccatccgtactctctggacgaactcctcccatccctcctccgcggccacaaagtccgctgccccctccgggtctcgaactgcttcggctgcaaatccgcgctctacctgtcttaccgccgtatcgccgtctcggaaaaggaagtgcttcacggattcctcggaatccgatgtgtcgtactggggattgattagctgggtattcgtttgggaagtcagcgtactaacctcggtgtgttcatcatcctcggccaccctgcggccttggatcagggccatcatcttgcccataagcatggtaaccatctcctcttgcatttgcttgatgagcagctgtttccacggttagaattcttcagtgatacaacttcgatccaaacttacatttgcagtgtctttgatgatgtgaacttcgcccacatatttctgagtctccagctcagtgttcgccgtgtactcgatgttcaatttctcagttgccttgcgttggtactcatccagatcccgctggacttgttcgaactcagggcattctttgtgcgcatttttatcacgggaaagcttgtgcacggtctgctcggccatgaagctcagcgcaatatgctgtgcctggccaaccttcttgaagagcgcagacatttcctccttgcgagattttgtcggcatggactctggcgtaggcgatggggtgggaccacgccagttttcgttaatgtcccagatctcgtcttcgattttcttgccgcgtttgatcagagtagccttggcacggccacgtcctcgaccgcctcgaggcttggtaactgctgcaggtcgaactgggccgacgaatccaccgcggcttccgcgaccacggcctcggccacgtcctcgaccccggccgccacgggctcctcgacctccacgacctcctcggacagcgctgtcggcaggggggtcgaattcttccgagggaatagggatgtcctcgggagatgtttcattctgagttgatatctctgtgccatttaagtggctttctggagtctcttcgagctccgtctcatcaatccgcagctttttgttcacgcggtcctcggaatcaatatccggagtttcattttgctgttccagtgactttcgtttatgcagtcggggtgaagacacctgattggaaggcgcttcttcagtctgggaaattttgggactttgacccacgggagtagctcccggcgacacaggggccgaagcaaccatgcgaggttcaggggattgagatactttttgaaagggaggttcggacttgaattcctcgtcatactggtgcatgtcatcatctggctcggtgatctgattatcaacggccttggttggtgagacatcttcttcgaaggagccctctccatccggcttcagtcttgctgattgccgggtggtccgcgaggactcaggaacagtccgaggatgccgaggacgccgcatgcgaggggtctctggattttgcgagacggcattgattgcggtttcattttcattttcgccatcatgggcatcatccgcatcagcttgaattagtttgagtgaggaaatttttaatttgacgatgtgcgagcgaacttcaggtctgctcggtgattcatcggcaggaagatggccaggaagactaggaacgccagggaatccagcgcggccacggccgcgaccacgtcctcggcctcgacctcttccccgagtagaggggggagtgggaatgatatctatacatctcagagattggaccgatggcgcagagctgtatatgaacataccttgtgcagtgcgtccagatcgcgtagaaatactaggagtcctagcagcaggctgtgcagccgcgcggtttttccttcttcccaccatcgctgttggtctgaagaaaattagttttgaacggggaattgatccagtagcagcaagggggaagcgcgggaaatcagggtggtaagaatgaacaggaaaatgagatgtaggacacagaggtgcaatggaagcaagttcccaagctcttcagtaggaaaatagtagaaaagggcaaagtacaagtcgcgtttccaaatgcagaatggagaaaggaaacgtcactcttgtagcaatggagaaaaaggcttggcaggaaaagcgtgaagtagaggtaatacacgtcccagatcagaagaagcaaagatgcagagatgcagagacccgaagatcccagatcccaagatcctaaagatccgacgaacctcacggtcacgatccaggagacagggtttaccagcgataagaaaaacaaagtgtggggagtggaaatggaaatggaagggggagacagggaagacgcaagtaagaacctaccaaagcgacggatctagcaaaaaaagatgcgaagtaatcgaaaacgcagagatctactgcaggatttgaccgggtggatggggaaaacggggccaagtaagaaaaaaaacgggggggagagaagaagatgcgaagaggaaaaaagaggttcgatggaataagacagggaaaaagggccaaaacaaggtgattaggagaagttggaaccggcgtctcacacaattcaagcaacgggatgtgttttgttgaatcgaattgaatcaagtcgaagaagaaattgcattgttctgattattgtgtattcttccattctatgtctattgagcccgactttgccgctcggctgaggctcggaaggacaatagcatacaccttcaatacatgactatattctgaatagaatacattcattccctctacaactgccttggaacaatagagtctataccatcatgtacgtgtatcgattcccagccacttccggcatacgtacgggggtatttggcatggacaggtctacgtatagttactataggtatgctgatattgtctgtctatttatcttatcttcaatagactattcatatactgttcatatctattcacatctattcacatctattatccttcttgatatcttctatagttatccccttcccctaagaaaaaatatacggacccacttaagtctaagagtcggtgacaacaacgcatgcggatgacttgcactgtagactatatacatattgtatatattgtacgtactcttcatgctattactttgattctatgagccccagctgagatatattccggagtatcttcagataatgtgtctcttcaaggcacgctagtccacgtcatccctagctacggagtactttgtatatttcctttttgccacaaggctgtcaccaggccattaattaacatggcatcattctcaagtccatcaggagtaaaataaacttccaggtatcgtataataaagcgcaacaaatacgagtgccaatcagccacattactccgcactactcatcgtcgaatatatactttgacgcattcagtaactatatgccgcagcaagatccaattataccatccgtccattccctatgtacacaaaatatatccaaggatccacccatatccatacccatcatgtacaaaaaagcaaaagcaaaacaaagagcaaaaagcaaaaaatcatgcagatcaaatataccgaggtagatcaatcacttttcataaggggattcgttcaattcatatctcttctcggaatgcgaacgagcaaaaccacgagtcggcctcgggcggaagctctcgtccgactccggcaatggggagggcgtgcgcatcgcctggtcgcggagggagcgggcagaccgcatgcgcgtgatcgtgccggccgtgatagtctgtcccgcgctcggtgaggccttgaccattgtgcccggcgcaaaggtgggcgatggacagggactagttgagcggaagagagggtggatgttgttctcgtcgaaggggttgtattcccacgttgagctgttggagctggactgcgtgggggagtcgacgcggattgtcgacgctgttggcgacggcatggggtgcactagccggtctaaggagagtgcgcttggtgggctgcggcgtaggctgggcatgctgcggatgctgtgggtgccccggggcagggagcgagggtcccggtatgggagggtgtcgggctttttgtcctgtgttggggatgggctccgggaggtgcgggttgaggagctggtgtcgatggacgcgttcttctcttcctttgtgctggaaggacagagtgttgcgtcagagtagcggctggaccgccgggggaatttgcggagggaggatcttttgggctcgaatagctcggacaagtcgcatactcgagggggtgatgggaggaaagtagggctttgggggctgtccttgagctcttgcgagttgatatcttgagagtgggcacgcggccattcagggttggagttctcttgggctagtgttactgcgagatatccgcagtacaagccctgtgcgaatactgatagtgcccagaacacagagcgaaccacgaagatcgaggttcgaaggctcattgccattgccccggcagatgctgcggcggcaacaagtaaatatccaccggcgacatacatgcattgtcgacggccggttgggatatttcggtggtacagtagaccgatggcaatcaaagccacgcagctcactgcacttaggatagtcgaggccacatcgggcgaagcttttgattttgcgtagcagataccattcagaatggtggcaatgaatgtcatgaacaatgaggctgctgccaacgagtaagataggtaagacatggcgaaaagagaacgatttggcaaagaatggcctggaagtatatatatcaaagagagtaagagagtggatatgtcaaacgttggcaggctgccaatccaagacgtttaccaatgcacgaaatgagtgttaggaatctgcagactccatgagagggaagatgtctgtatttatgagtcgagcatgcgtcgatgcaggagatggttcgcaacacgggacggggcaatgcggatctcagcgtggctcaaagtatatcgaccggggaagcagtcggtgtcaacctgtcaattcttttttttcccaaaggagccggtctgatctatcattccggcatggtggttagactttgtatataatcggctttgacagggatcatgtcgattggcctaggcagagcgatcccgccggggatgcataatgtgtgtggatatcggcaattgccatctttctagccattgaggcgaagacattgcgcttaattctggggtagccctatcctgtcaggactcagcctagacccgtcatgcagaggaatccgatagtctgatttagtcctctgcacgccttcgcatatatctaaaagacgtaaagacatgagacacacaaaagagcatctgacaatatattggagtgttcttacggagtacattaacacccctaataggtatcatcttggacccgacaaacacactatattactgaaggattactacgtcaaagacagagcgcataggcgactattctcatttctttaatctcactaactgacactatttaatctgatccatcagtcttgtggacaccaccgcccgattgaggtggcggatcctcttcgatctcaatagtgcgggccgaatgtgatgtgtctctctcccttgcaagagaaaatctccgcgctcccctggatctcggctgaaccagcctgagataagttagtgcgaattaggcagatcgaagattgtactttgtagattttatagatccatacttcgtagtagctggagccacgggatatcttgacctgtcctgcaggaactatggagtatacaggttgaattgtctgtttccactcttccggaagaagcctgccgcatgccattgagagtatttgtcagttttaattaagagatttgcgtgttctgtggatttttcatatgtatcctttttccgtgtgggtacgatatgtgcaatgtgcaatgtacagtgtacaccctccgtgctacttactgagaggcaatagtggcgcttaatactatattatacaggagttcggaagtaccgagagttcattgtagagaggacttcgataccattgcagcaatttgggatatagatttgcatctccaacctgttgactccagatgtctgcccaggtgggatgttgtcatccaggcggcaacaggcaaccagcttggaatcaaataatccgatgtacacatatgtacacacatagaccgggagagagctatacacaatatggagcctataatagctgtcaatatcaaaacttcctttcaaaagttaccctggcaagttgacgcaagttgtcatgatcgtggtagttgagtagtggaagtaaatccgaaggcggtcaccgcactcgtttgctatcatcgtcactctgaatgctcccctcctactttcttttcttttcttcgacttttcttcgactacatcgctgagaggatcctttgcatcaagtaatctccctctctcctatctcaatccgtcatcttttctccctatccctttgctccctggttttactcaaaagcggcaaaatgaagctcactttcaaggtacgaaaacttgctcttggggtcctcactgctgcagactgctgacagtcatcgattacaggatctgaagcaggagaagtttgtcatcgatgtcgaaccttctgaaactgtacgtgtgttcctgtcgctataactacccatcgtcatctagtgcggggctcatctgtttaggttcgcgaggtcaaggtcaaaatcgcccaagagaaaggcgaatatgaggcagagcgcatgaaggtcatctactctggttcgtattttcccccttgctagacggattctccgttcacggtgctatggctaaccttcgctttgttccctttataggaaagatccttcaggatgataagacagtcgaatcttacaacatccaagaaaaggacttcctagtgtgcttgccttcgaaggtataggttaacctggtctatgatttccgagccagagctgacatttgatgtagcaacccaaggccgcctcatctgccgcttcctcccaagttccctcgaccccggctcctcgagctcctgtgtcaacgcctgctgctcccccggctcctcatgctgccattgctcctccctcttttgccgcccccgcgacaccttccccggccggtgcagctccagctccagcgagcggtcccgctttcggagacccttccgctctcaccatgggctctgccgctgagggcgcagtcgtccagatggaggcaatgggattcacacgtaccgatatcgaccgtgccatgcgcgccgcattctataaccccgatcgtgccatcgaatatctcctaaccgtaagcttttgttggaagttacttcttgaatgtttgctaatgatcacgacagggtattcccgaaaacatccaggaacagcaacaacaacgacaagcctcagagccagcccctaccggcgctgctcctgctgcccctgctgctccttccagtgatgagccgcacctcaacctcttcgaagctgccgctcaggccggtggtgaaggtggtggccgagctcgcggtgctgctggtgccggtgccgctggtggcgaagctctcggcagcctggagttcctccgcaacaacccccatttccaacagcttcgtcagcttgtccagcagcagcctcatatgctcgagcccatcctccaacaggtcgccgctgggaatcctcaaattgcgtcaatcatcggacagaactccgatcaattcctgcagcttctaggtgaggaactcgaggacgaggaggctgccttgccacccggcgcgcaggccatttcagttacggaagaagagcgcgatgctattgaacgtgtatgttgaaacttcccctcgatctcatagttttatgactaacccacaaccagctatgcggtctgggcttccctcgcgactccgtcattcaggcctacttcgcctgcgacaagaatgaggatctcgccgccaacttcctcttcgaccagcctgacgaggatgagcagtaaagaattattgttctcttttcgacttctcttcctctcctacttttcccctttaacgttatgttctatgatgaataccaagcatgctgctgtttgaattgattcccatctctcctcaccggatcccttcccatgaatacgactcagtgctcagctagcgtgtctgagttcctgtttgctgagtgtgtacttggcttctttgcatcccgctgttccctttctccataacgcctgttatgtatttagcttaatgggaaaaatgggacttgttcgctgcatttggagtatgagtagtcgtgtaatgttctaggataagtggcgatcttcaatctggtcatctgtcatggtgtgattttcggtcatgcgtattttatatgcaggtagactgtgcagatgacctgcgaatagtacaaggtatccgctttggagaagtctatatatatcctccacttggtactaggccgcgagacccgccaaatcgtcataatatatctccacccagcattccttatgtcgagttgatatatacaacagcccttattgccattatcaggcaacattccaagagtatgaatgtatttttcgaatgtccgtacaaatattcaaactgacaatgcgctacccgcataccataacccagctgaccaacctacaggaataaaaaaagccattgaataaattgaacatggtactacttacacgtagtcatgtagaggtaagtacaagaccagaacccccaaagatatcaactcgaatcacgcccatccccaatgcaaaaaaggtatctcatagacccaggaaccaaccctaacatgcaccgaaaatattcagagaaagagaaagaaaaagagagaggaagagagagtgctcaattcaaatgagaatgtacataatgcatgtatgtagtttcccaaatacacaagatgaacaaaaaatacaacgccgcatccatggacatacgtagaagtacatccatgaacgagaaggagaagaagaagacttatttgcaagatctctgcacagaccaaacatccagcccacggcgtccaacgacccgtttcagagtcggcaggatcccgtcgtcgccgaagtccatgtcatcgaggttgaggtggttgcgatacgaccacagttgatggagctgcaaagtttggttttgggcttgggcttggtcttggtcttggtcttggtcctggtcttggctctgaggcgcagagaagacgtattgatcgaggaaagtagccgatgtaggcgcgactaggaacacaggcgatggagtagagcagccgggtacaaccagctccagctgctggatcatatccacacctgacatgcccatgagatccagcgtctggatttctgtggactggtcgtctccaccgagaagccacagcggtggggagtatgtcttccaccagaacaccgttgcggatggtatgtacggtgttggactagatgagacgatgtcgcgcattgctagctgcgtgggaacgacgccgccttggtggtagacgcccataaggaagcccatggctgcgttgaagatgacccatacaacaacgaggaggcgggagccgcgcatggggaagcagctgaggaggaggggcacgactgggaggaggaagcgtggttcttggtgcggaaagagggagaggagcatcgttgcagagagcgcggagagggcgcgcacattgcgcatccagtatggtattagcggccggctgaaaagggagactatcattgcaatgtaggctgggccgaggagttggaggaggtttgcagtgaagtgttggtagtgggggtggaggccgtgctgggctaggttggcagtgtcggtgttgtagaggaggttgttgaggggagttattatggggtggcggaaaacgctgaggaaggaggcagttggccggtagaagatcgtgtctgtgtagatggcgatgaaggaaaagaagagaccgaagaggaggaatgctgcgagcccgagtggtctggcgcgaaggcggggttagcacatgtgtattgatggatgagctggaggtaaaatgtatgtatattgacgcacttgcgctggaactgaggcagcaattgcagacccgggaagagaaggaaagccgggaaagtgatgcggttgaagacgcccactacggcgatgaaggcaagcacggcatgggagaagaaggacgagtgtcgctggagctaaggttagcatggatggtgcgctttggagctttatctctcccaccttattgttgacaatgcgccgaatcaaaaccagcccccaggcaaccaacagggtctcgaggctgttggaaaatgtgtgcgtctgatacgtccaggtgacatacgatgaggccaccagcaccactgtcgcgcgccgatgacgcggagaaggcactagctcatagatcgcccagtcctcgaggacaaaacttaataggaacattccaccgcgcagcgcattgtaaatcatgtggggtggggggctgccctcgccggtctcggtatagaaccatttcaagaggttcattggaagctcgtaggccgcccatattgggaatatgctgcgaatggggtgttcaacggtgaattcccatggtatcttcgacggaaatgagaatatgcgacctgtattcaggcgacttggtcaatgtttgttcttcgtataggagagtcgcggaattgccggatcgcgctgttttgctttctgctttagggaaaatcgcaacaaagagttcctcgcgtccgtatagtcgcagtatgatcgcgattggtggggcgatcattggatagttgaacatacctgcgaaaagctctggaccttggaaattctcatcaggatgtagatagcttggagacagcgcaaagtacacccgaatcaccaacaacagtaaatatgttcgacgccacatggttggagaaatctaggaacattattagacgaaattaaagaatgaaagtaaagaatgaagtgaagggagaaaggagggtgggctaacactaacagaaaagaactagacgcgtatcattggatgatatcactgtcgcgttaagcggcaaattggagcggagattgtgagaggcacttatagatctattactgtgagatttacattgagatatatctgtcttgatctgctctgatcattgaagcctagagagtctgttttgaaagtgacgtaatgtttttcaccaaaattgtgcacgacttaggcccccaaggttgttctggcgctccatgagaagtacgagtaccgccagactccagactagtctgccgcactcgggttcggaagtcccctgcgatagtacagcccgggccacaacagtcactggccattgccgctgaggatccatagatgaagtgggctgtttcctcgtattcttattctcgtattcctatgccgaatgccctaacagcggttccgtctcccttcctcgttatagcggcttggctcgaagcttcaaatcccctagaccacattggatcgaaatattattcggcttggtcttggcatgcatctgccagcaccgcagagtggtgttgaattcccaagcgagttggcttcttggcaggctgctgctgttgatgtatactagggcatatgcgaccggcttgcctggatgaacaggcgtagatgatctagtctgatctagcttacggtcgccggaagattgagatcgcatcttgactcttgccggttgcctagagaaagtaggaatggctgaaccgacgtccatctcgggtggattgcgtgccgggccggtattaaaggtggacgttcttgcacctcatgtgtcatggtaacatctctgttgaagaggtatcattacaggccattgttgaagccaatatagttgatctggctatgtcatcgacaaagcgggagcggttactgtgctccgctatgtaatgctccccaatccacaaacgagatttgcacttaaggagtggtggtggtagacttcggggaaccacttttcgcagacgttctctttttgcgacattctctgtttatagacgttgtcttttgtagaagttctcttttcatgtttcgcggaagttttcaaaggacgcaggcgaggtaatagagaagctctgccataaaacaaacaccatcgctcttatatttcattcataaaccgatttgtgagcctaatgaggcatactcctagcccttttatatagttactgttctactatgatggttagtttttctaacacgttactttatgctgtgacatcatacaagcacttattgtacctctttcgcgcttgggccattcccaattgtgcttcactgcagcgaccagcccttaaatttgcccgcctgaccagaagatatcgtaaatctgtcctaattggaaggaatcgaagtagacgtagtaaggcgacttcctatgaaacacatgtttgaagcacgggtctgaagtgttcccatggatagacggattttgtccgtaactactttaggttgactagaagaggttgtagtttgttcgtgtatggataattagaacagagcaggatcatatccggctggtcaaatccattttcaatagggttgtctttgagggaagcctcgatgtcgatatctagatccttcgagaatatagatccatacatgtttagcttagtacttggacaatctactccgtacaaagaatataattcagaaatacattacaccttttaccaaaatacaaattccagccgcccagattcttatttcagcccgtaaatacggacagccgccgttggttctggcttagtacggagtcaagccagcgcttccaaggttgcattcccaactgttggctcaagtcacaggctactagtctgtttttgaccaggttctcgtttctttaaatcaaaagaatgagtcaaagcaaataattggtctgatttaggcaacggtccgaaactaagacgtgggggctggctttgtagccttgtgagccttattggctttatggataccgaccgcctttggtaacttagaactccctaaacctcatcacccgccatctactcgttacgtcttcgtcattttcaacctgcaacttctctcttcagacacaccaacttcgaaacctggatcttttcgttcaataagcctacacctttccacgctttttctacgcttggtcagtaacatcgccaccaccgaacgccccgcactactcgaaaacgaccagcaacactaacttcagaacattagaacccatctccaacatcataaccatgagtgctatcaccctcaccagctccgatggagtcgatctttccgttggtaggcataatttccacagcagtcgcgagtggagctgacagattccgaacagaacgcaccactgctgagcgctccgtgctgatcaagaacatgcttgaggatctcggcgactctggagaagccattcccattcctaacgtgagtgtctatttccgagcatagccaccatccaagatcagccgcttacacctctttgtccaggttaacgaggccgtcctcaagaaggtcatcgagtggtgcgagcaccacaagaacgaccctcctagtgctagcgacgatgacgacaaccgtcgcaagaccactgacatcgatgagtgggaccagaagttcatgcaggtggatcaggagatgctcttcgagattatccttgtacgttccgtttgcagacttgttcttcggtacatttactgactgttcataggccgccaactacttggatatcaaggccctccttgacgtcggctgcaaaaccgtcgccaacatgatcaagggcaaatccccagaggagatccgcaagaccttcaacatccagaacgactttactcctgaggaggaggatcagatccgccgcgagaacgaatgggctgaggagtaagttgccaccaccgtatccattgattgaatctatgctgacatcctgcgctagtcgttaaatgatgataatgtgtctgttctctctttttaaaacagaaaatgatatcctcccggctgtttacgacaatgtgcagcgtagcccttgatgtcaaagtagggtgattgtttttcggggcgttcttttggctatttttcttcccacggtagtttgatatgagttgcaaacaatcgctagccttgccaatggcatttgttacagtcatcctcaaaacagtagcattagatagcggggcggtgaagtcgatccttgcttatatttgtccaatgacgagaacaggttgtaaaataagcatataaacgcagatcaaggctgtactacaaatcgtgatacaacagtaacacaccaaccaggaacagacagcatggaaatatctccatgcaatgccccatcataatctacaaccaagaccaccccaaaagtaggcaaaaggacattcaattcgatccaatcagattttgtatcaaaaaagaaaatcccccgccacgccagtcctacaagcccgcccccaataaagaagacgatcagcccccaacagcaacaaacccttttgcaaacataaacccgggcctgccatccatctcgacaaattatgcgtgttggaaatccatcatatccccactcggaaccgtggagaaaaagcatgacgacccattggaagattaagaaaaaaagaaaaagataggcacgacccaaagcaagacccggatcaagattttgataattgaaattttttgtttgcaattgcactcaagagtagttccacgatccactagcgctctcaagttcatggtcaaggcatgttgttcgaaattcggttgtgggcgtcacatcatgaaaagggtttcggaaaaattaatcatcagaaacccttgaaccaccccaacacagacacacttcggttgccagatgacatcgcgagctgaactgggacttttgggaatggccggacggagggtgcgaatactgagggtccgcttagaccttcagggtcgacttacgccagtgtcggcgcttggcgttgtatctattgtagcattgtatcagccatgtgttcgattcggtatttctgtatttattttcccctccatttctgggttcgtgcggtcggcgcgtgcgcggttatctgtatttccctctcgcgtgcaccgtgccggtatcactcttcccacaaatggcggtcgcggatatatagaaatggatttggatctcgagacgaagggtgcgatttacctgatggtgttgccggtgcgcagacggatccactgggggatggggcggttctgacgctgagctttggcaagcttttgcttggtgcggaaggtcttgttgctctgtgtggaaaattgacgttaaaattttgtttctcagtgttcagagttctgactggggagagaaagacggcgaagatggcgcatgtatttttcgagaatggcgggaacagggtggtaacataccggcatcttgaaggttgatcgcgacggcgagcttgttggatggacggatgaagttatcgaccttcgagtgtggatggtttgtgtgcggcagggcttggcttcgcttcggttgggtcaggtgatgtgggatttgtgcctgaggcggtgaggccctaaggcttcaaggcagaacacattaaacctggcacagtggtctaatgctgtttaggccgagtacctcttggcactccgtttttgaatacaacataattatataattatacaattagttaaatagtaagttatctaagctgtggtattcatgtccgagaacaaaagagcccgttatgatgatatggctagataataataacggctaaaatacggcaacctccagtttcattccttgcaaataagccctttagaaggttatcagtcaggggcctcattctcgtgcgtctagaacatttgctaaaatgcagccactattcaatccaatctccgatgtatgtgatacatactgcctaagtactctatactgacagtctcaccaacagccccgaagctatgatctggagagagacttcccgctagacggaacggaccttgactccgtcacagacgagactctagtgacccttcttggctctgttcctatgatgcatggcattcggtattgaaaggcggcggcagtgtcctaccatgcgaagcagagatgctcaaattcgttgcgatcaaaaccggcattcgagttccacgagtccatcgttcatttcaagttgaggatgagactcagtattttagcacgaagcgatatatcgtgatggattttatcgcaggccaatctctcgacaagtgttagaccgacccactcgataataaccaatgacaaatcgctatgcaagttgcggacatgatcaaagagatgcagtctattgaaatcttgcagccaggccctttcgcggccggttcttcacggattatagcgccggtccgtttaaggactgtgctgaactccaaggctggtttaaccacaaacttgagatctgtaagcactacaacaaatgtcctaaagatatcccgccattccaattcagcacctttgtccttacccatcaggatatcagtcctcgaaacctagttctagaccggaatggagaagtgtggttgattgattgggcgaatgccggtgcatatccccctgcctttgaaagcgctgcattgatggctcagcagtttttccccggcttcaataaaacagttttggctgttattccacgatttcctgaggaagaactgcaacttgattctattacatatgggttgattactgcggcattggcctaatgaggtcttacatgatacatgaatctgtgtctttatgctatgattttggcattgctccagttctttaacttgctgatggtcaatgatccgcggcttacgcggttcttagcttgcttataccgtagtaccacaaacaggacattgcaggatgcagcaggatacaaggtggcatagtacctcgagtgattataacgattcctttgactacataagataaagcactaaaaaagacaattcatagagcccgacctaatttaatggtatgggaccttctatggttcgttccattaccactgtctccctcctgttccattatcactctctccctccaaattaactccacgtagtggtccaaacactttctctataccttttctattatctcgttcctcggaatgagctcggatgtccctaccactgcccttactcccgtcattgtacctgaattagatccagcctcacttgcattggatttgaaaaaatcctatgaaggccaaattccactgccgacattaccaaagccaaaacagcagatgagatggaaacagtcggcaacggatccaattgacaacctcatggatacgccaaaaggttggaattccaatgaacccgatcttgatcctaagtacgtatttcccgttatatccatatatatacatactgatatatactatatattgatctggatgctcagattgaaaggtgccgtgagcggatcgaggacaacatcatgagccagttatttcaatgaaagctggaggacttgttacgagagcagaaacgtcgcaagtgagtatcccctgaaagcctttttcttaaccgggtttaagtaaattatcagtgcgatgacgaccttagagccggctggcttgagttggcctgtcgtccagcgcttggacacccttaaagggatccacgaacacattctcagcgagaatgaccagtacgaggtggttggtaatgtgacgaatataatagcagcatatcgattgggtcaattgagatggaatccaggccttggtacctaccagtctaagggcgttcaactctgccagccgaggcctttcagatgggacgaaattaatctcattgatgccaaacatcagggtcacaaaggcttttgggtcgaaggggtacgtcttttcaaacaccaaacttatcggaaactaacatagcttcaagggccagggccaacccaccaatgattcaagtttaagctgagccacttcctacaactggcctgttcagacaggttccaacaacgatatgcaaataatcgacgaggaatcggatagagcaatcatcatcgattttggatcttgccggaagctaggagagagtctagaaaacgtcggccgtacctacgaatggtacaatggtgaagtgtagaagtctcttcccgagaatgacttgaacgccttggaagaaattcacatttggcttggtgttagttctaaaggggttcactttgaatagtaggactgggcacgaattcgtattctgctctagtgataatatcaaccgccgaagcgatatactacaaatacacgtccatctagagtctagcactctttaccgaactaagagccgtacgggttcctgggaagggctcctccccccctttttcttcttttcttcttgtcttctctccatccctccgaccaccatcttcatgcaaccggtggaatctgttcttcaaaaacagagcaagaaaaggaaacaaaaatgcaaaggtacgcgtctgaaaggcatgctgaaccttcgaaccactcatcaagcacacgtgatgttgtatgacaaagatttaatcgttcaaggcagccatctctaacccaaagagtgcatttcaacctgaacattgaaaacaagagaagaaaaaccttggaataaaggaaggaacaagggtgcagggtttcatgtgtgctttccctgcaaatcttgcaaccccttgatcacccgatttgctcttctacaggaagggaaggaatgactaaacaggaaggatctttcagatcaacaatcatgtcgaatttccgcccagttcactttgtgcctgcaaaccgtcaagccgagatgctggctctgccagtactgaagatctttgccgtgcctcatcaacagcaagccggtacaaaccactggtgcttctatcttatgacatcctcagacacatccgttcagattgattgtcaaccaagctacactgagcctagttctgtccttcggggaggctccaaagccaacctcgtggtttcggaattatcatgtcttgttcccaacgatgctcaagagcgcttcgagcttgatatcacaccagggctcttagttgggcaagtttatgacctcatcatccagaatgcacgccacaagtacgaattcgacatggatggcgtcgggtgtaggtgctgggccaccggccagcttggtcttttccaccaagctcaaatcattaccaatgaatcccaagttgcggcgacaaaggctgcgatcttgaagttgtggcctgagcagacgccgctcccgcttgaccaaggagcctattacccatgattcaatatttgtgctcggtttcatatgctattcatggaagtgctattccatgacttatcccgatttcggtactacttttcttacaacaaatgaccggaaatagccaaaaggaagcggatggttacggaatactgagactgttatatatggaagagaaagaaatctaatgttttcgcagtcccggaaatattgcgctcgcaatttggtggctgcccaagcaccttgcttcagtactccgtaagcaggttcaaaccagccttaaccgccatatttacctcgtataatcgtcgacggctatcgtatagtagggtaattttaggtagaagcattggaattgtgtctgtttagcggaaagtagctttggggctgtgggtgagactgtcattatagagtgaatcaaatagggaagtaggaaacatccggacgaggaaggactcagacatgaatgagccaatcaacatgtctctcgcttgacgggcgaatcgttctgggcaccttgtcacatccctggagatttgttgagatcacaactttgaggtgcataatgtgtctgtgcgatgggcgcgttcaaaatacttcccatcaactcaagcgcttcgatttattaccaccacacttaaacagtcaataatacacttgtcagcctgaatcatgtcatcagttcctattcgaaattctgttacgaaaatttctgattccatttggcgccttggctgcacaatcgagtgcaatcgaactgcggaaccagatgacacatgcgcagcagcctggaaagacggagaagattggtatattcttcggcatacaacatctgagcaactacccgatgctacgtctgcaaattcaccggttcgtttgatccacgaagggggtactctatctgcagtgtgggctattggaaataatgccatctgcaaagtccaccctgggaccctaataccacttcagagagcgaaactatcaaattcgttcaagataaggcaccccaagtacctgtacccgaagtaatttactcctgggtagatggaaatcgatcattcttggtgttgaaaagagttccgggtatcacgctgagagacgcgtgggaaactatgtccgctaccgaacaagattctatcttggatgaggttgttcacatgtacgatatactcgcttctattacttcggaccggctcgaggatgtacatggaggtccagtgtccgagccttacctggctcactcgaaacgggattcattggagccgttgagtgtctgagtgtaagacatttcttccgagaggatcttcatccaaatccggagattgaagagcgattccatctctatcaccccgatcttgcgccaggaaatataattgtttccaatcagaagctattggcgatcatcaactgggagagcgctggattttacccacgtttctggatatcaaccaaaccttctatttcccggggaatgaactttcatccgccaattccaggtattgaggaaactgaatggagaaagcgactcagagtgaaactcgaagaacacggttaccctcgatttgcagattggttcatggaatggatgaggacaaaatctagataggatagtgatttaagcactttttggttaatccggggatagatctatatcttcaccctctatatccttgatagaaaccatggcctctcatgagatagcactgggaaaggcgcaaggtgtttatctcggtcaaacctcacctgggcaaggagacatgggcaacaatcaatggccttgtccggagtaggtaaaaggagtaaagttgcagtcaaagcgtcgggcatcgggcatggaaattagccgacgcataaaaaaaaagtggaaaaggtccagatcgggctcgttgcggatcaaaaattcggtcgaaataccccgtataatcccagttatgactcaggtgttcgtattcgttttcgcgtattgcgttttgcgtcatggtgatgtgtttcgtgtcaaagtcaaggcatagtacggagtatgtgtgtactatgcaactcatgcatgcgccaatcataccggacctgcgtcaagcatggagtaatgtagctcgtggctgtcaagtcgtgttccccggaaaagggcgcgttcaagggatgcccttgcacgaggaatgtgaagaaaggaatgacccgcctgacctgtaactactccgtaactagttagttacttggaagccgattagcaatagagtcccggagatagaggcagggtctgccaggtctaggcagcacttgaggttcgttgcataaaagacacgtcggagttcggactacccgacccgaagagaaaaaagcccaagccccctcataagtataatctcagaacaaacgcatttagagcctcccatcccttccttcacccctgttgttaatctttactcttaatacaattactcctacctttgacatcccttaatatctgtccctttgtacctagctccttgattcatcgcagaaccacacctcttcagaccatcctcaaccagttcttcatggagtagagatccaaaatcgaaagtttcaacatgcagcagcccgaggagggcgtgacggccgttgagaagatgggggactcgcagcttaacgagaagcccatcgacaagcgcgattcggataccgcttccgcatcaacaaaggagcacgaaagcacgaccccagtcgcgacagacgaagatgcgatctatgctcacttgcccgagcatgagaaggagatattgaagcgacagctagatgcaccgctcgtcaatatatcctacttcggtctatatcgctatgcatcccgcatcgacatactcatcattgttattagcacactctgcgctatcgccgccggtgctgccttgcctctcttcaccattctctttggctccttggctacggctttccaaaagattatgctccgcaccattgcctatgatgaattctaccaccagttgacccacaatgttttgtacttcgtctacctaggcatcggagagttcgtcactgtctacgtcagcactattggcttcatctacaccggagagcatgtcactcagaagattcgagagcactacctcgaagccattctgcgccagaacatcgcctacttcgacaagcttggtgcgggtgaagtgactacccgtatcacagccgacaccaacctcattcaggatggtgtctccgaaaaggtgggtttaaccctaactgccgtcgctaccttcgtgactgccttcgtggttgcatatatcaagtatgcccccttggctggcatttgtacttcaactatggtcgcgctggtcgtgattatgggtggaggctccagactgatcatcaagtacggcaagctttccttggaaagcgccggtgccggtggaactgtggcagaggaagtcatcagctcgatccgcaatgcgactgcattcggcactcaggacaagctcgcgaagcagtacgagtcccacttgcgtcacgcagagcgttggggcatgcgtctgcaaatgagcctcgccgtgatggtcggtattatgtttggacttatgttcatgaactacggcctcggattctggatgggatctcgattcctggtggatggtaaggttgacgtcggacatgtcttgactatcttgatggctattcttatcgggtctttctccctgggcaatgtcagcccgaacgcctcggcatttaccaacgctgtggcagccgctaccaagatctttgcgactatcgaccgtgtatccccgctagaccctacttctgatgaaggcatcatccttgaccacgtcgagggtcacatcgaattccgcaatgtgaaacacatctatccttctcgccccgaagttacagtgatgaatgatgtttcactcgctattcctgctggtaaaactaccgcgttggtcggtccttcgggctctggcaagagtactgtcgtcggtcttgtcgagcggttctatcttccagtcggcggccaagtgttcttggatggccacgacatccaaactctcaacctgcgatggctgcgtcagcagatctcgctggtcagccaggaacctgttctgtttggcacaaccatctatcaaaacattcgccacggtctgatcggaacacgcttcgagcatgagcctgaggagaaggtcaaggagctcgttgagaatgccgctaagatggccaacgcacacgacttcattattgctcttccggaaggttatgaaactaacgtcggccagcgtggattcttgctgtctggaggccagaagcaacgcattgccatcgctcgtgctatggtcagtgaccccaagattttgcttctagatgaagctacttcagcactggataccaagtccgagggtgtcgtccaggcagcgcttgatcgcgctgctgagggtcgcactaccattgtcattgcccatcgtctatccactatcaagtccgcgcacaatatcgttgtcttcgtcaacgggtcgattgttgagcaaggttcccacgcccagctgactgaccatgatggtccttacttcaaactggtcgaggcccagcgcatcaacgaggagaaggatgcagatgctttggacgcggatgaggatgagagtgaggatggcaagcacatggccaagtctcacatcgcacgcgtcaagtcagttgctagtggctcaaccattaggaaggatgaggccgaaacattccaggagacaatgcatcgccaggagtctcgcaagtccgtgtccagtgttattctctcgcagaggactgctgaaggcgccagcaagtattcacttttgactctgatcaagtttatcggctcgttcaacaaggaagagcggtggttcatggccatcggtcttttcttctcgattctcgccggttgtggacaacccacccaagctttcttgtatgccaaagccatcagctcactttccttacccgaaagccagtatgccaagctcagatcggatgccaacttctggtcactgatgttctttatcgtcggtattgttcaaatcatcaccttctcgtcccacggtatcgccttcgcctttagctccgagagattgattcgcaaggctcgcagcagcgccttccgagtcatgctccgacaggatatcaacttctttgatcgtgaggaaaatagcaccggcgccttgacctctttcctctcaactgaaaccaagcacttggccggtattagtggtcaaactcttggaacaattctcatgacttcgacaactctcatcgcttcaatcgttatcgcactttccttcggatggaagcttgccctcgtttgcatgtctgtcattcccattcttctcggctgcggcttctaccgcttctatatgcttgccgcgttccaggcacgttccaaggtagcctatgagggatcagccagctacgcctgcgaggctacatctgccattcgcactgtggcttcgcttacccgtgagaccgatgtctgggcattctaccacgctcaactcgataaccagggccgcaaaagcttaatctcggtattcaagtcatcgctcttgtacgcagcctctcaggccttggtcttcttttgtgtcgccctcggcttttggtacggtggaactctgctcggtcaccatgaatacgacgtgttccggttcttcgtctgcttcagtgaaatcttgttcggtgcccagtccgctggtacagtgttctccttctccccggacatgggcaaggccaagaacgccgccgctgaattcctcaagctgttcgagcgtcggcccaccattgacacatggtcagaagcgggcgagaatttggaccattgcgagggaactatcgagttcaaggatgttcacttccgctaccctactcgtcccgagcagcccgtgcttcgcggcttgaacctcaccgtcaagcctggccagtacattgccctggtcggacccagtggatgcggcaagagtaccactattgcccttctcgagcgattctacgatgccctttctggtggtgtctacgtggacgataagaatatcgccgacctcaatgtcaattcttaccgcagtcacctggcgttggtcagtcaggagcccactctctaccagggtagcatcaaggagaatatcctgctcggtagcgccaacgcagatcccaccgatgaggagctagtccaagtctgcaaggatgccaacatctacgagttcatcatgtctctccccgatggctttaacaccattgtcggtaacaagggaggcatgttgtccggtggccaaaagcagcgcgtcgctatcgcccgtgctctccttcgcaaccccaagatcttgcttctggacgaagccacctcggccctcgactctgagtctgagaagatcgtccaggctgctctggacgctgccgctcgcggtcgtaccactattgccgttgctcaccgtctcagtacaattcaaaaggccgacattatctatgtgttcgaccaaggcaagattgttgagagcggcacccacaccgagctcctgcgcaacaagggtcgctacttcgagctggtcaatctccagtctcttggcagggccgcctaattcctttggatttgctttttaatatatgtacacatacccccttcttcctttcttaattttatctcacatctccctttctcaatcttcttcattcttgttatagatcatttgttgtcaccagcgaacacccggaaaccagggtacactgtctcctctcgataaagagaaaaaaatcaaaaaacgtccattagtgatgtaggattagatgaatgaatacaatgaatctcaattcaacgccgcccggtttcttcgaactccttccactcagtaaaaataactccttcaaaccgtttcaagtccgttccatcagtaaatctctcgcattctactacttcaatcctcctccgaaaccccgaactctctctccacctcaacctgcctcacccccctcgcatcagcaataagccccatcaacccctgtccaacatccttgatatcattgtactcatgcaagagcttggtataccgctcgcacgtggtattaggatcgttactggaataagcagtggttagagatggaagatgcaatgtttccatgttcttttagggccgtgtcctccatagctgcatgcaattgggagagctggggagtgtttacataagctgcgtggtcattgtagttagatcggcttctaaaaccgcatgcttagcttctaggcttgcaatcgaagcgcgaagggcgacctgcgttgaatgttagtgtttgatatgatagacacgggtggcggcaaggtggggatactaagaacgtacgattctttgctggtctttgtaggacttgggttccttggctgaatccatggagattgtttgcaattaggtgcatatgcatatgtgttgtgatacgtcagacgcaggagatgagagcattgtaagaggagggagttatccatgtcctccgtaccccagaattatatactcctgaccaatcacggccatgctgaataatccagttcaaggcttccaaggtttgtgcgtgcgcatccttaattttgctatgagtttttgttatttgttaagtgttaaatgatagaatagctatatcactttgactcgagagttcctgagaacaaaaagacattgttcctttgcctccacgcgtcgtttccgccttaatcggatgccccggattgggtttaactgttatccgcatctgttctcttctcccttgcaactccctctgaccacaccatggcatatctccgtcagtccttatggactttatttgtattagtggcctcggctctcgcccatggcggccacgaggctgttcctgagggcgaatctatctcccaggatcctatcgtacgtcctactacgccattcccctcggcaaaagttaacacatgattccaggatgcaacactatggactcatatgattctcatgggtttggcatttggcctaatcttcccaacgggaatggttctcggagtatgtaccgcttcactgacctctccgtttccttcctaccgtcacgtcacgtcccatctctaacaaaagaaaatagatcatccgttcccgctggcacgtccccgtccaagtcgtcggcaccgtcatcgccgtactagcttacttcctcggccacgcccacaaaggccgccaattcgacaagaacctgcacgcctccgtcgcaaactggctgatgctattgctggtcgcgcaagttgtcctcggagtatatctcaaactgcacctggagaaggcgggccaggcccgcatccgatggatcttcgtgctggcccacggcatcgtcggcaaggccatgcccgtcctcagctgggcgcaaatgctcttcggtggcattgccgcgctcggcttctgccgcgatgaccatctcggccagtgtctggcccatttcattatgggctccgccttcatcgcgtacggtatctgtttgaccatcctcttgctggtcggccagtattggttgcgccggaccggccgcagccaggaattcttcgattccctcatcatcgccgcttggggctgtgtcaatacttttaccgaacaccgctggggttccgcttgggtgcacaatgacctccagcatactactatgggcattatctggtggtgtgctggtctgctgggtatgtggctcagccgtactcgcagcggacgtcctaagcgtaacctcattccggctattgtcatcttgattaccggatatgctatgtcggcgcatccccagcagctgatgatcagtaccatggtccacactatcttcgggtacaccctgatggcggcgggtctgacgcgcattattgagatctcgttcattctgagggataagcctgctctctccgagccgaacagcttccaatacctaactcctttcgtatgtatactctccggttgatgtggtatataggatgatactgactcttttctctttcagttgctatatgcctctggcttcctctttatgggcgccaccgaggagcagatgctcctgctaaacaacgcaggcgtcacccacgtggcgtacgtgttggtcctctacagcattgccttcatcctcttcctctgtaagttgattccctgctttcttcttctagaacaatcactcatccttcccttcagtcgtcaacatcctgctccacctctacgctgtccacgcctggcccaactccgagtccaccaatcaggacggccccatgtactccactctcaacgggaacgcgaatgtgaatggccgtgcacgctcaaactcgcagcagatccaagatgccgaggcattcgagctccatggtttgatttccgatgatgatgagggcccttccatgggaccgcggaagaatagcgatgaggaacttggaaaagaagaggcccatcgctgaggccgtatattgattcgctggttcccttggcaagtatatcgtgcattttgtgatattgtgacggcgtctaggttgggttgggttcggatagcattgcaggtcctaaaaggccttgaatttgagtagctaatattatatctgaacaaaattgtacattattctcaattccatgaagcatcaatggttgctcgtgttctatcgtacataatgatacccggatctaagctcggaaaaaaaaaagaagattcgtaatatggtaaagagtcctcccagtccagtcccgcttattccaattgccttcagtgatccacggtaatcctacctggcggcacagcagccatatccagcgcaccaacatcagggaagaaaggatgaagtgaataaatcggaccaacgctcttttccccgtcaaacagcaacatattctgcagcggctgctccctcgccgagagaacattaataacatcctgcgccagcgcaccgcccaaaaacgccgctacgggactcagctcgctgcccaggttctgcaggaacgtccgcaggaacaccgagtccagtgtgagtggatccagcttcaattcctggtgtcggtctcgcgatagcttcgtgaatagttccaggtcttcatgggtgaaggttgggcggtggccgcgtagcttttcgaattcccacaatgcgcgcaggcagctgagcagtggggtgacttgcttgcggcgccttgcaagtcgggtgtattcttccgggagtggggaggtgtttgcgagaattagtggtgagtacacctcgcgcttggtgacgagctcgatgatcttgcttggttctttcttgttggcgttgttctcttcttttttcgtggttatgtcgatgatgctgcgggtgggtgtttcttgggttgcgggcgccatgttagatttgctgcgctcgatcacgaagtcgtggctgattaggtcggcgaagacgtagccgtagaagccgtgtagaccggcggcgtagaagggtctattggctagtcggcaggcggcgttcacggtaatgttggtgacgaagtcgagctctgtggcaattgtgatatcgaattgtgcgaaaaattcgggtgctttggtgctaacatcggatgtgtcaatgttgagcttgactcgagggttcattttgtggatttgcggtcctgcgacttgcgcgcgctggagtgggttgtcagcggatgcggtagggactttgctctgttgtagctcacgttctttccaatcacatcctgctcactttgcgctgcggcgataaaaaactgcgcgcccaggtcctcctctgtgacgtcctggtggtcgagtatggtgagtgatccgatgcctgccaagacgaggttcttggccacttcatttgcgagagctttcacagtgataaggaggatgttcgccgagcggattctagccgttgttaggacatgtagtgctttgcaagctggattgctcacttttcctgcgcgtgcactccccacagccggatctgtcggtcgtacagtgcgatttcatctggcaaagtcagtaaggattgaagcagattctagttattttccataccagcactgatggcctgtgtattatcttgttgctccgccatagtgtcgatcgagtacaatcttgcccaggtacgagcttggcgatttaaagcctcgcagttgtgtttcggggatctgctatcaagtgagaagcactggttcgatgacttaatgaggggcgcaatgagaatggaagttgtaaggttgcagatggaagttcagaagttcaatgatttcaaatagtccaagaggtaaagaagttccgataggtttaaatgtcaggtgacccgggagctactgtgtggggccgtggggacaaagaagtatacaacctcatgcggacgaggatatctgtttcaatatattcactgaatattgatagaatatgctagttagatggggatcacggacatattctcagaaaaatctcaacataggatgaattaaacaaacagttcaagtgtctgattttatgatatcattgtcttaggctagttataaatagaggctatatcaagtcaacaaatagaaatttgcataacacacgactcaatcagcaaataatacgaagatattcacaagtatgctctagctttatcgacaatgtcctctacaatactgtagagcttttctgcagaacttcccttcctcgtgttctcatatcagttttgagcatatgagttctaagtaacataatgatagttaggttgagaggtaccatcttctcaccaatgagatttggctttaagtattatctaaaaggatattgaccaacattccggaggccactttgtctttgatcctttatcatgggaaagtataaggtcaaagagctaagtgacacaattaactatcaccccatgccggatgaaggtgtctacacggagaaagaaagcacggagtgagaactgcaagattaatgaaatccaaaatccaaaatccataaatacaatgaagttatctctcaacctcccaccttcactccactatcgatgatataatcgaccatcacgtgttaccaaccttgtgaactcacaagaccaactcttctccgaaacactttattttaccagtacgttaatctttttgggtttctttgatttctgttgggttagttctaagacgctatctcctaccccatatccccaacccaggtaattccacctcaagcggtactaacgagcctgaacgatggtatgtctctcatggctatgcgtccgactgatgtctcacaccttcctttagtcagggaattacgattaccctcgtgcttcttcctcttcaacccgccgctcccgcatatcccgtcattctaggcctgacgagcgccctgacatcctccgtctccagcatctccgcaatctcgtatcggaacgaactcgctccggttcttacaacgcctacaacaccaactttgccttggaaacattaaatcgagaaatcgctgcgcattctctggaccgatctcgcgatcgtaccaaccttgagcaagctcgggccgacgtcgatcgccaactgcactccgagacaactggccccgcagagccaactcggagcatttggctcgaccagattcgttcagaacgggctcgaacttcgctctccccggagtcacattcccttcgccatcgtttgccctggcaaacgttccgaccgccaagcccggacggatctttatccaggtcaccgtctttcatgccaccatccggccagtcgggccgtgatggccaaggacggatgaagcgtcggaagctggacaccgatgataaccgcgaggaatttcgaggcttcaactatggtcaatatgggcaagtactaccgggaatgctgcaaatggaaatcgctagctgcgacggaggaagctacgatccggatagcgggtgttcgcgccccgagaacgttttggacaacaatacaagcgtgtactctaccagagaagcccgctgcaatttagtcctctgtcaccggggcgaggccccgttctgcttgaagaagatcgttatcagagcccctcaatgcgggttcgacgctccgtatgtctgccaggcgtgtctgtacgttggactcatgactaatgaaatgaaacagaatacaagaaggtatggtattcgtcgcgatgacctctgatgaactgcttgcccgcaccgcccaataccaaattcaatactctagcggccgataccgccgtcgagcccgccgcagtggcatgcaaccatcccaggaatacctcactgggttccggccaccacttcaaaatatcgaacgcacagttctcatgagcccacattcagccgctgttccgcataccgcagaagacccgcaagcgcagttccgcatcaccaccgagtatgacaataacgaagattctggagatgacgaagaaagttctgcatttctggagagaacccaagccgaccagatggaagatcctttatcgtctactgatgagagtccaagcgatgaggatgactcttcaagacaccagagtcgccgacaggttcaatcggaacgtttgagtgccctcagccgtgtttctgagcagagactacgccatagcccgagtcttgtgcatccacaccccctagccgagcctgctcatccaactgccgaagttttgaagcctcatgcgcgcttcttcatcgagcgagagaagagcatggttaccattaaatttgacccacccccgtatgtgtcattatcattggatgtggataaccgaattttaacgtttccaggtctggccggttcattctcatcaagctgtggagcccgcgagcccacgggaatattgacatagaaagcatcatcgcacatggatatgcaggtccgcggttcttccccagtctcgcttctcgttaacggtgggaacaaagagttttgatgcattttggatcagagggatagaagcaattatttctcttttggtgcatagtttttcagcccagactgtcttactaggtcaactagtaagacaacttatcatgattatgatatgactttcaggattattctttattctgccctgatttgttccatcgtgcaattcatcgagatcacactaaatacatttcgtatgtgggatcaaaaggtatgaccacttgatcagcctttaattagcatctccaataccacatttccaaggaatctttcttgatatatttcttgatagatgaataggctatcttctcttctcggccaccacagcgtaataggtagtagcatgtcgtttccaattttccatcaggctccccttcgatcaaggagaagttggcgccaattaagtacctatataggcccactggttgccctggaagatatactcggcttgcaccagcatcagcgcctggctttggaatgatgcgagaggagtctattggagggactggtttttcgtttgaataaacatggttgaggtaggaagatggtgagagttcactgcgagtgtactttggagtgtggggggctagatacgggacatagccctaattatttcaatgtaaatacctacggagtacaattccctgcatgctatcttaagatgatacatgccctccgaggtcctcgacacatatgttgtacataagtatctcttcatcaccggctacgacgtccgccacagcgacgacagcgagtgtaagacccctcaaccccactagcctagaccatatcgttgcatgctgtaccgccgtattaaatgcaacttgccatttgaagaaaggcttggtgacagcaatttggtgggggtcaagccacattatgttatctcttgacagggctagattcttatcgatgacagtgatcgacgccaaggtggttagtggggacgggggtccccggtgttccctcggctatgcgcattggtagcttgcagcttgatctaagtcaaattgcacctgtatacaactgttggaaggataattcaagtcgatattctccgtcacctcaaaagaacccgactagacatgtagaaatcttgcggcggattcgaaaaacagacaccggccgttcataggcgtatttgggatatcagcattattaggaaatatgcatcattgtgcatggtgaagatacgtgctggctgaatttcaggatcacgtaggttggccacatggagccgatccgtgtctcttcattcttatatcctgcgtggcgcggttagctagagactaaaagccaacctataagaatagattgtcaaaacgccctaaaaaaccctgaactggcgccatgcctgagccacaaacgttggaagtaagggagccaatctgaaatatgagcactaatgcacggctctagaaatggttatctcaaaaacggtcacctacgtgatagtcggaaaattcttgaatcggttgttccaaatgcatttgagcgcctgaccagcgccttcatgttgttatatgtgttcacatctgtttgtgttggcattgcaacatgtatactccgtacccgtgcgggaactgagttgtacttgacagcctcaaagcatggctaaatcccctgcatgtgttgactagtgcggggtggacaagttatcaaaattgcgacatcctcaaatagcttggggtctggttcggggctggtctggcagtggtaggacgacggaagtggtggacacgaaccaatgtacttttagaatagtagctggtccagccccggggctctcggacagtggaggtctccggtggccccgctatagtaaattgtcaaagtacggatgaagccattgccgctggcaaccaatgccggggtattgtgggatatcggacatggccgcggagtcaggaaaacaaggcaacttcaaggcgtcacttctctatccaacgatttcccgtggccctccccctggcgatgacgccaatagacccggtccgccgttagcctgtttggccaggcaattagtggaggagctaaacggctcagcgcggggctcattacgcatatgcaataggtgggaggagatcatggatgtatgggaccatgttagctgcagcgctagagtcgaaataaaagtctatcctatttctgatttgaaaggcgagagaaatagagtggatgtaagggagaggaggaggagaagaggaagctctttaaagagtcaggtgtccccttcccgctttcttagtctttccttctcccggtctctttctacttcttggcttcttccatctctctacttttttttcttctataatttatctgctttataccccttcctagcagacgtccttgctaccgataccatgcgtatcaccgtcaacgtcatccgccccgagcaggcggactcggacatcatcaacctagaagtgggcggcgatatgtcagtcgagctcctcaaagctattgtcgaaagcgaaactaccatcccacccgaagcgcagcagctcgtctacaacaaccagctcctccagaacccttctcaaaccctagaccaagccggcatcaccgagggcgacatgctcggtgtgcacgtcaccctccgagctccccagccctccactcgccccgccgcttccagctccgtcgcgcccagacagaacactcaaccccgccccggcatgccggaccccgaaacgattcgcctacacattctgggtgatccccgcgtgcgcgaggccgtgcgcaggcagaacccggagctgtctgaggccgcggataatgctcagcgcttccgcgaggtcctgcttaggcagcaacagggcgaggcgcagcgggaggcggagaaggaagctcgcattgcgatgctcaatgccgatccttttaatcacgataaccagaaggaaattgaggaaattattcgccagaatgctgttacggaaaatctacacaatgccatggagcatcatcctgagtgtacgctctacgtctttgaactgccggctaggctgctcaactgagaataaagctaaccaatatgtttctctagccttcggtcgcgtgacaatgctctacattcccgtggaagtaaacggccaccgtctaaacgccttcgtcgactccggtgctcaggtgaccatcatgtctcccgagtgtgcaacatcgtgtaacataatgcgcctggtagaccgtcgctatggcggcattgcgaagggcgtcgggactgccccgatcctgggccgggttcactccgcccagatcaagatcggcgagatgttcctgccctgctccttcaccgtcatggaaggcaagcagatcgacttgctcctggggctggacatgctccgccgccaccaggcctgcattgatctccagcggggtgctctcgttatccaagaccaagccgtccccttcctcggggagggcgatattcccaagcacttgactgaagagttcgaggccgaacctacggtcaagggagccgatggtgccgaagtgggtgcccgcactggcgcggtcacgcacaaagcggagaacaatcccaatgccaatgcgacttccaatgcatccgggtctgggtccggcgcgtcagggtcacagccccgaatcaatatccggcctgcgcctgcttcgcggtggccgcaggattccgttgccaggatcaccgagctgggattctcgcgcgaggaagccgtccgggctcttgatatggcacatggagacttggaaggggcgatcgggtttttgatttgatctatggatggattccgctttctgcatttacactcgaaggcgttttggtcgggatgggaacttgtattagcgagatttgatcaaagcacgtaatgatgtgtacgattataacgctggctgcattataatagattttgtttattgtcctacatgtaatgtaagtgtgtgctgttcattcccgcttggttttgggcattagtttgtcgcgtagacggaataccatgtctagagccatgaatccgcctatgaggtgttagtaacagctggtgagctaattgcgacattcttgcagacacccttggactgcacatacctaacgccatatagggagcatacagcatggtaagctgctgcttctccgcgaccgagcggtcagtccaactccacaccaccaccagagatgtcaatgtagtgatgaaggcctggataccgaacacgaggaggtgtacagggacgagggggtggtctagatgaattggaaattgagttagttgctgattgcgtttgccattgtcgtgtcgttcgtgttcggggagaggatattccagatattgcatttgatatagatatgtaatggatataagacgtgatggggtggactggatgataccatatacaatgtacaaatagtagcatgtagcgtgtaccaacacgagcttagaaaagaaatggaaatacctttaagcaaaccccggaccgcccatatcgagagcgggaggtggtacagcagctccatccagatgaagacggtgaaccatgttggggggtcttcaaagaatttgtcgcggtaggttgttatgtagaactggcgcaggtggtgggagaggtttgtttggagaaaagctgggaggagggggactgtgtcgattactgtattttggcgttagtgtgcatatacgaggtatgaagatatgaagatagagatagagatagagaatcatacggaggataatggggacatgggtgacgaaaaagagaagataggacaagtcccgtttacgggtgcagatggacatgatgtgctgggtcatatgcaatgcgaaaggataagacggtgctggtgctgtgtgtgttgtatacggagtatgctgtgtgtgtatgttgtgtgtggtcgaagtgtagatgtttaggggaaggggatatcaggtgacccgaggaacaatctggaagagatggaagttatagaactagaacatcgtataattgcttttttcgggggaatgctagtgtgagatcttaatttctagcgtatttcaccgagataaccaaagtcccaagtcgatatacacatccaactccttcgagtaccttgatctccatctcaccgctgcttctcaattttaaggtggcctgactggtctcctcggggagctgttgaatccgagctaccctatatccacaagggaatacactgaagtagacaaaggaccttgatgtcaaccatcaagcctggaattacatcatcgggataaggtaggcatgcagtgatgctacagggaatctccttgataacctgcctcgagagagacatcccgggaagtagaccgcaagatcgggatgccctaattagttgatgacagggttctttagggttttcctcgtttcttcccttttcttcccgtttctcctttctccttggagcttcctaaatagctcggaacagttgtaaatagtccttctaaccatatgccgaatcataatccccgcatgcatagatcatggcagataatgcaattgccattcggcctgcagcatgccttatcttcgaggtcttcatcatctaccgtagcggtgtaagaccatggaagctttggaacgaaatgaaaaaaaagcgggcgaacggtagtggaatggggatttgcatggcagtggataagtggagagacgcgtttattgcttttcttgctttattgtttttatttttatcgaaattttacttttcttcctggagagatcatttttctgacttctttttttccattatctctgaccgctgttcgcatctttccactcggagatgaagggaagcgttggagatgcgtatacagaactatatataaaatataaaaagaacctcaatcccacttccatctcttctccttatccatcttatccatctattcctttactccaccctatacagatcgatatacaatctatacaatgccttccacagccccccgccgtcccaagcagcccaagaagcaagagcccatcagctacgacatcaacatcccctatgtcgacgtagacaagcaatccaagatcacaaccaaatacccccaatacctcccctcctgggacccaatctggttcgacccactccagcccttcgaatatgaagacccagccctccgcgtgcgcaacaaatcaaaacccaacctgctgcccgcaaccgccaaagtctcgcacatccagcccagcctaggcacaatcatcgagaacgtccagctctccgagctctccgccgccggacgggacgagctcgccctgctcatctccgagcgcaaggtcgtcgccttcccagaccaggacctgatcgatgcgggcccagatgcccaggaatccttcatgcgccacttcggcaaaccaaactaccagcccgtgtccggctccatgaccgaccatcccgccttccacatcatccaccgcgacggcaacagagacgagatcacccgcttcctgcagcagcgcactacaaccaccctctggcaccaggacgtcagctacgagatccagccgccagcctatgtcatgcttggcctcctgcagggccccgaggtcggcggtgataccgtcttcgcggctacggacctagcctacaggcggctttcgccggctgtcacggctttcctggatggcttgaaggttacgcattcgtcggcgaagatgattggccatgcgcgcctgacgggtgggttggtcaggaaggatcctgttgatactgtccacccgcttatccgggtgcatcccgtgaccggggagaagtgtatgtttttgaatggggagtttattacgcggattgatgggctcaaggataccgagaccaagtgggtgttggatttccttatgaatcacctcgttgccggtcatgatttccaggttcgcgtgcgctggcaaccgaggactattgtgatgtttgataatcgctcgactattcgtgagttatttccacccccttttccctcccctggggaatgggaattggaattgagctttactaatgagatcttagactctgctattgtggactacttggatgatgataacggtgccaaggctcgtcatatcttccgcttggctgctatgggcgagaaacctattcctgtctatgaggatgaggaggacgaggagttcgaatgatcgtaatgtgatagaatggggttcggtgtttcgggattgattatagatttaatctggttggaatttgatttaacttgctttcatttgccttcatttacattcaaagattgaaatattcaaatatccattgcaatgatgatcagggctatactccctgtatccattttgactgtgaattcgttttcattaccaccccacgcctagagttacaagcagaaatcccagaaaaagcaccgatccttaaaagatcctatgtcaagtaaatctcaggagtcaccgccacgcagatctgcaacgctacatggccagtccccccacatcgccgcggcagcaaacgccacattaccgtagaatatcatcgatccgtgaccgcaagtcatgagcgatctccaattgttccccactaatgacaccgctctgttgcaggatcagcagcatctcagagacacgttcggcaacgatatccgagccgaagaccatgccgcccaggcgcacggtctcatggaaccatccactcagcaggtacagcaggtcgtgcgcgatgaatcgccggtttgacccgtggaagggcgcctcgtcggtgtagtacatcgtctccagcaccgcatacagcgattcgtgtgcaacgccaagatctaagaacagatccaccacccaggtagccgggcccacgttgcgttgaaactctaatgcataccgctccagcatggggacgagctcgcggatggggaaaatggtctcggacatgcgaagccgactgccgaggctgcggactttgtcgatcaccgcttcgtaaggttgcggtgagccgcgttgaacagtggcgtcatggatcccctggatcaggtgttgccaagttgacttgacgtcggccgcattgcgatggtcggcttggtagaagatttgaaggcagatatcatggtaactggcggaatcggcgtatttgttgaacagctaaaacatgttagtatcttgttggaacttattccgaaaaaattagaacttactgtgctaatatccatcactggcccatcgacctcgcgcaggatctcgggtttccgttcgggaagaatccgctcgtcatccttgagtctttgaagcaggtcatcctgaagattggccacgtcgatgagattcgaaatctcttgcagcagtcgctgtcttgactgacgcccgacgtccggtgtgaaaatcgaagcgttggcgcgggcttgaccgaggtactcaatacgacgactcaggggcaacacgaaagcactattggccaggtggaattgaacctgtgcagtctcgaagaaccgttgggattgggaatagaaccgccagagtagatcagcatggcctagatcatcattcgacttgcgctggaggtaggtgacgacaaatggagattgcgtctgcagcaaccgatcgctccagccctgctcgaggtaccagtcatacaaactcgtcaggaacacctcatcggtagaatcagaaatcacgccataggcttcgttctggcgtttggcaatagtggtcagctggccatcaatgagaccgggatcggatgcagccaatttgtcaactgcaagcacgactttgaaaatgagatcgtagcactgcttgcggaaatagaagtattccttgcgggggtcctgggtagttgtgagcgggagctgataccgggatccatagggaataagggggataagcacctgttcgggacgctgatccatgatccaggaatacgcaaggtttgacttgtcggaccgagcagcaacgttgagggcgagctggatagcacctaaagagaaaaggaataaccaatcagtatgagaagcaaaggccaggatcacacaacatacctgcaaagaactggttgaaaatgaaattgtccactgccgaaaccagataatccattggtaagtattccgccacctgctggaagagatgcagactctcattgagcaagttgcggcccaattcagtattggcaccggcctcagtcgcacgcttcagcatttcttgtgccttgaaaatcaccacatcctcagtactgcagaaactgccacagcgtcgtcgaagtgcatcagccacagtctcgacgttggagcccttggcaatgttgcggttaacaatgcccttcacgagttctttagcaatgtcatgtcccttgctggagctgaagagttcctcaaaggtgaggctgaggaacttcgctttcgattcagctggcaaagtcgccacaatctcatcaacccgctcatcaaatagaacaagtatgaatgagataccttcgattgtgtgtgataccaattgaacgagagagtgtaatgcgcggtgctcggcttgcagcgccacttcttcttgcttgctgtttacccgggcaagagcgtcggggccgttgaggccatcaataaaggtcttgttcaccttgaagaactctgccagtgaggagagatcatgctggacagtctgcagtttgctggaactcacagacgcggaaacggattgtgcgccattaggtccattgcccactttggcaatcctctccttccagatagatcgcaacagacgcgcaatgtatagtgcaatacccgtgtgtcgaggagagggttgcacggcatcaagagcagacattgagccatccgcaatagcattttcattcagatgggcccgaccaccttgagtaatgaaggcctggcgtgctgccgccaggatgtccggatcggtaattcgagtcagtctttggtcaggggaaatctccataccctggccacaagccaccgccagggcagttgccagcatctcgctccgtccatatgttctcaggaaagtttggatatcgccggtcagtccctcatggggattgccgccggtgcggagcaaggccgcgaagatatccacgagacgacgccgacgaatgatgtgaactccaccattagtcaagattgcaatctcggcagctgggtggtcgaattgaacggcaagctcgttggtcactggtgaaggtgccgaaaccagaccaatatcctctgccttgcctcccaggtctagaatgatagccgactcagcggctttaccactgaccgagccttcctggtactgagcgatacgaccagagtcaggggttgagatgaaaagagtatcaatcttttgctgtggatccttggtagtaaaacagaagaaatagccgggggaatatcgctcggcgagacgagtgggtgaaagtgtggtaatctgaccagcagaaggtaaaaccgcgccaagaggcgaaacgagtgagatggaagatgccaccccgctcacgccgggggagagatcgacgggaggtgtcttgacatgcagtgcctgcatgcttgtcggagggctggtgttggtcgacgcaggcgcccaactgtttgagccagtggcgctgagataaatgcgatatcctgttgctgtcgttgcaactagatgataccgcgacgcttctgtggctggcaccggactgatcgaaacaatcttgattctggggttcagggtttcgttggaggtgatgatgtgccctatgttagagtagatatccagagcgcgtttggtgattgcgagtgtcaaagcgccctcgggtcccatgtggaatactcgaattgtagatgcagaggagagtgtgtagagcagcttccgagtgtcatcgagtgccatctgcactacatgctcggaagcgctttgtgcaaggtttgtcaggctcattgaaggcctgaaagccgatagacgcgagctggtatggttgactctgccacagcggccctggaaccacctttcctcttgttggtaagtgacctcgtgcacatcggtgtcagacgatcctccaaagaaaatgcgtccagtggatgctgacgccgcgaaaacatttatatccaagccgcggactgccaccgacattcccgtgtgatacagagaaacctgtcgacctccgctgggcgtattctcatagcccattcccagcagaatgatctccgcagttgtcgcaatgaccagcaaatgggtgatcgcaggcaagaaaactcccgggcgcggtttggtcaacttaacagcattaatgctgttaggctgttcctcgaatcccaccaattgcgggttagagtgtgtgaaatcccaaatgtataatgcattgtcaatcgcgacccacgcgtgatttaactcggcaaacagacccatactggtcgaaacttgtgcgcggttgtattgatcgaaaatctggtcggggatatcgtacattttgactttttggaatggtgcccatgattgggatacggggatgttgtactcagacgaggagccctctgtttttttttgtcagtcttgcttcaagcagtcttcaatggggatatttacgagataaatagctgtcaaggtctggataacgcgattcgctttgcaagctgctattaatcgttcgcgccccgcgttcctcggtgctcaatgtttgatttttggacttcgaagctgctggagggagctttggcatgggcgtttggggttgcgtctgcaatggtgacctagtcggtaaaggccgtgctgtgactggtgccggggtctgaaagtaagctccaggaaggggtttctgcggcgtcgctggagggagatttgttggaagagtcggatacgacatggcgacggttttaaggagggagaaagggacgatcccccgctagaaaacacaagaagctgcagtgtaggtcggacgagaaaaagaaagcaaaagatatgtgggggaatgacgatgagagaaggtcttgggaggagattggattattcaaggtctttgcgaaaagagagagtcaacacctgggagcgcacagaccaattgggatcttccgccttcacggtattgattgtcgattgtttcccattcccaattgatccctcaattgaacttgtttcctattgtcttattgtctaacgttttcaatcaaaatgttccaatccatccgtttttcttcgcgcctaccagctcgtctggtccggtggaattccaccggtccggtcctgccacccttgatggctactttgcggactgatctgaaaactgccatgagagccaaagatacgacaaggtagaggtccttttcacttctgttttcgaggttcagtaagcttataattagactgaatgtactccgcgctttgatctccgagaccaacaacgccgccaaaacctcctcgccgattcagacagacattcagctcttgtcgctaatccggaaacgcatgaatgcctccaaagatgcggcaaaggagtttgatgccgctgaacgtccagatctgaaggagaaagaggatgcacaggttttggtattggaagaatacgctagtcaggttcagaccctccccatcgccgatatcaaggtagtggtcatcgaccagatcgctgctatggtcaatgccaatacgaagcccaatccaggcaccgttctcaaagctctgtttgctgcgggaggccctctggatggcaagccagtagaccggaaagaagttgctactgaggtgaagaacgcgctctcttgagcttacatttaccagattgtatattagtgtcacaatagcctcagtcaagggcattaaaatctcattcataatacaaagaactcctctccaacgccagcctgaaatccttatgaacagaagaaagctactcctccaagagaagtcatcagaacacccaaccaccaccatcggtctggattgatcagctgttctctagcgatcagctgaaatcctgcctttgacgagagttctcgcttttgcttttgcttatgcccggttggtatgggattcaatgtcgtggtagggagcatctttggtggctggtaggcgaggaacatgggatggacaagtgagccgtccatcctggtcaaatcgaggcgtttaatgcgattgaacttgtcgatgtccacggagaattcctgtcttatgtcagataagccgtctaagagaacacgaaagaaatgtacctgaaactcctcggtgatgttatatcgtgtgtactggcctgcctgcttccggcagggattggacagtagctgacgaccatcgacagcaattggtgtcaatatcagcgttccgttgccgaacacagtataagcaccatgttgccattgcatgactccccccgggcatgatgggtcagccgctgttcgatattaatacagcgtccaaagtctagatccatggagaactgacggtttgagattgcgcgatagtatgcggattcgtaatttccttcatcatcgaatgagtatgaaatgcctgttagattcggctcgatcagtttgtcgttgagtggatcgtagaatccctatgcgcgttagtctcgagtcattcatatagtgtacatagttccacatactggaccagtaagaacatcacgagatttggtagtccacgttccaaacaaatcacctgcactcgccaaagcggctgtgactagaagactccaaatcaaaaacatcttagttgacagagggaaaatcgacagaaagggagtatttgaagggcgccctttattggggtggagatcaacaacatagttcagcaaggccctggaatgggaagggtttgatgatcgaagatgtacaaggatcatttgtctctattaacaatcataaaacatacaatggctctatagtgtagtacatatagttatcactgtagttttgagatgattccatcctattggaagtacccgcttgacgctttttccggtttatttttgtaatttacttcctcgtttacccgtggacttgataatccgtcgacaactatcccaccagaatggcttttcaggttgcaaagcgcgaccttcgcaagaggatgcgctcaatcctgcagggtttgtctataagcacaatcattcaacaatgtcaggtcgaatggtggtccttgggttgtccataactaactttgtcccagcaagcgcagcaacaaccaatttcttgtcattgcccgagtaccaaagcgctaaaagcatcgccgtatacctgtctatgccaagcggggaactctcaacaaatgggatcgtaaaggatgctctacagcaagggaagaacgtctatatcccgtatattcatacccaggataaaaaatccatcatggacatgttcgcgctgaaatccatgtccgagttcgagtcattacagctggacaaatggggaatcccatctctcttgtctacgcagattgaaggtcgaccgaacggattgacacaaggcttggatcttattgtcatgccgggcatggcctttgaccacgggttccgacgacttggtcatggcaaagggtattatgatcattttttaacgcgatatgcaacaacgacccgcagtatgccattcctcggtaagtaaatcccagaaaaaaatccgtttatcccgactgaactccattgtagttgcccttgctcttcaagaccagttgctcgccgaggatattcctgtggtggagcatgattggttggtagatgcgatcgtggttggtgatggtcaattcttagaccgcagggtgtagcgcaaatcgaaacagaaaaggaaaggcgaaaattcaaacagcctggatcagagagacattgtctcccttgagaaggacttggcctgttgcgcattagctgtgttcacatagactttcaatttcatcgtacctagaggccggcgcttctcttcctctgtcttggtagccagacgcacttcaacggcatcgtcaataaccaggttcatgaattcatcaaagccctagcacaggttagctcaaataacaagcaaaacggtatcctgtaaagaaacacatacgcggatcttcccctcaatgcggaaagcgagttgctcatacagccagactgagacggtgctgcgtttctgcaggagactgaaaatgaaatggatcggagccaacaatgtcttgcggcctgccatgatgtgcggttatgtcgagagtgatagctgtcacgcgggagacgaggcgaagaaagctctggcgggcctggcaggcgtcccgtgatttgattacggtaatacggttatctggtcacggccaccccatcccaccatcaacttgctccccctcctcgaacgcgtttccgcactcagatgctgatactttcttaatatattgctgagccttgattaatctatttagttcaacatggccagcaaggaagccgggcaggcattcgccccggtcctggcggccgtcgcgacaatgcaaggaaatgtgtctaggactgagaagactcaggcccatgaattccttgagaaattccagaaatcggtacgattctttcgccgagacctaagtggtatcttttgttaatttcaatgcgtttttagattgaggcctggacaaccacacatgctctattacagtcccccgatgtgcctgtcgaggctaagctgttcgccgcaactacactgaaaggaaaagtaagggtattcctacctgaggagtttcgccgtttctaattgcgcagattattttcgatctcgatcaactccctccggactcagtattggccctgcgagactcggttctaaacctattggttgcatttgcgccgggcccgcgccctattcagacccagctatgtgtgtgcttggccagtctggcgattcagatggtcacatggcaggatgtgttggcgactgtcggagcagctctaggaaacaccgcaggggattgtgtgctggaattcctgaagatcttgcctgaggaagtcaccgagggtcgcaaaatcaatctcagtgtatgttcctctaatgcgtttacaaaagttcaagctgacatctacaaaaggaagacgagttgctcgcaagaaccaaggagctgctagaagacaacgcggagcaggtcatgcagctgatgatccaatacgctcagtcgtcgcgtacgtattcgacggccacgtcccattctcctgccgaattaaattccataactgaccatgaacagctgccgccgcaaccaacccccgtcttctcgactgcattacctcgtggctacgtgaaatcccggctgccaggatcgttgagtcacctctcatggacgtcatcttcaaagcgctggacaacgacgcatctttcgacgccggtgtggactgcgtttgcacgctttaccgcgacacaaaggacgtggacgagtcattgcccatcattcaagccctttatccacgattgatggcacttcgtcctaaagttgctgaaactgcggaggccgaagatttggaggctttcaagggtatcacaagaatgtttgcggaggcaggtgaagcatgggttgttcttgttgcacgtctgccgagtgacttccagggactcgttgagacgcttctcgaatgttgcgcacgggactgggagcgcgacgcagtgtctctaactttcattttctggtacgagctgaagcaatatattgctctcgacctgtacactgacgctcgagtcactttccaacccgtctttgcccgattggtggacatcatggtgaaaaacctcgagtttcccaccccggaagacggcgaaaccgaggacctgttctccggagaccgcgagcaggaggaaaaattccgtcagttccgccatgcaatgggcgatgtcctcaaggactgctgtgccgttgtgggtgtgaatgattgtcttgctaaaatctaccaactgatccagcaatgggttgccaagtatgcatcgcaatcaagcgacgaacatgttcctcattggcaggaattggaggcccctctgttcggtctccgcgcaatgggccgcatggtcgacccccaagagagcaccattcttgggcagttgattcctctgattgttcaaatccccaatcaggagaaagtgcggttccaggcgatcatggcgctggcacgctacactgaatggacagctgcccatcccgatacattggaggcccagctcaactatgtgatttccggtttccatcattcctctcaggaagttgtacaggcctctgctcttgccttcaagtttttgggaactgactgccagaagttgctcggtggtcatatcgcgcagcttcatgccttctacgagtcggttcttgacaagctgaagcccactagccaggaggaagtcactgagggtgttgccgcagtggtttcggtgcagccccaagagaagatctacgattcatacaagatgttctgcgacccaatcatggcccgaatcatgaaccttgccaataatgcgcagactgaagaaggacagcgagccgtcgcggatcatctacagctgatcactatctttgtgcaggtggtgactccgattcttgcaccgggagaagaaaaccctgcggtcaaatactgcggtgagattctacccatcatgaccacgattgtgatgaactttacgtcttctacgcctattctcgaacgtgtgtgccgatgctggagatacatgatcatctcttatcgcactgacatgatccctcttttgccgactctggcccagagtatcgcgaacggattccaggcctcgcgcgagggttgcttcctttgggctaccgatgcggtggtgcgcgaattctccgatggtgccgagtacgtcgaccaggctaccagcgatgccgttttccagttctatgagcagcaggcggttgctttcctgcgaatcttgaacgatctccccccacaaaatctgccagatgtgattgaagacttcttccgtctctcctctaacgccgttcgatactatcccaagaagtatatcacttcgtcccttgccgtccctatcttctccgctgcactcagtgctctcactcttcaacaactcgaccctctcatcgctacgctgcattattatcgggatctgttcagctttgcatttgataagcctatggtctcccagttcaccagcccggaaggtcagccttacgttaacccgcctgaggttcgcgaggctgtcaaggcgttgattatctcgcaaggccagcctttggctcagcgagtcttgacgggcatgatgttcacattcccgggtgactgcttcgctgatgcgtcgggagtactgatgacgatgttcgaactgctccctcaggaaaccggggcatggctgcagaccactttgcagatgctgccgagtggcactatgaagcacggcgaagccgagcgacttttgaacagtgtctctgacaaagtccagtcaggagagacccgcaaaatccgtgttctcctccaaggttggtcccctccccttccctccccttgttctttgttctctaatctaacctcatctagacttcaccaactcttaccgtcgccgcaatgtagccccacgcgagggccttggccgtctggaggccgcccgattccgattcagcggatgagaatgccactgtaaattcttattgagtgctgatctgcactaaaaaagagaaccctatggaagcatttgcacaaatcaggcgtcagttccttgctattgacgtgccacgtagtacgatacacgatgggatggcatgaactcggtgtgatgattaatgacctgctggtacatcggcctgaccagaaccttttctggctttgacattgccatatgttgtaccagctcgacctgtatctaggtattcaatagtcgcgactcatttctgcattgagatgcgttggcgcactttctgtgtgtgggcatttgatcatgatcatgagttatgaatctattgagcatcaatattcgattggcataatccgtatatatatcttaggcgtagagtagaagggatctacatgtatattcattctacatatcactactagtagtatatatttagagaagaatagactatattccttgcaatgctatatatacacaacctacaacacatacactccgactatctctcaccaataaagtcatatccacaccaccccaccgatatctccgcacttcccccggacaacccgtttgaactcccacttgcgcttcattctgtgactcatttctgctccctaaccattggtccttcctttggtgctcagacattcttttttgactccaccttccagtgatcatcgtgtcatggcatgaaatatggagaacgacggtcaaccctccaagagacggcgacgcagtcgcaaagttctctccgatcgtaagttcgaatgcacatttgaaggctgtgggaagagttattctcgcgccgaacacctgagtcgccatgctctcaatcatgccccgaaacaaatctatcgctgcgactttcccaactgttaccgatccttcgtgcgacaggacctctgcacgcgccatcgtgaacgtcacaccaccagcggttcccagctccagaaacgtgatagtttcgccgaaaatggcaccaaaacctcctcgccttcttcgcctgctatcaccgcgcccgaatacttcgttggctcggaggatcccaaacctccggtgacaacataccccctcaccaccggagtggatagcaatgagataccagtggaccaatattcggattttcaggcggtactgccccatactgaggatcttatcgaccttgactccatatcctacccgattttcggcggggaaacctataaccgatcaccattcgccatggcagacgattttgcggcatggctattcagcgagccactcgcgccgttgggctacgggatggtaccacttgctcagaatcagttctacatcaacgaggctgtatataacgacgacaacttttgctcagtgattccacaacatcccatgagcgtgacgagtattctggactcgggagcaccgccggctctcatatcagaaggaaagcgtcaggagttgctgcacttgatgtcaacacgattcaatgaatcggcgtatgcgtcaggcactaaacgcaaagatgcgctgatggacggggatttgaataacgaccgacatgccttgagcttacgcatgatgcagacgtacattggatcgtattggtttcacttccatgcacaactcccaatattgcaccagccgacattcagtgccgatcgtaccccgaacctattactactagcgatcatggcaattggcgcggcgacattggataagattcatggccagtctgctattgaagcagcggctgaattggcttgcttcattgcctggcatttgcgttgggaaatcttcatggatgcggactttcggccgccggcgaagctttgggtgttccagtccctgttactactggaagtttacgagaagctcttctctacacgcgcattacacgaacgcgcacatattcaccacgacacgacactcacgcttatgcgccgaggcagttcgctcatcggtagttcttcatttgctaccccagaaaccaaagaagaagacgagtcatggtcagcctggatcaaggccgaagcgactcggcgggtggcattcgccgcctttttgttagattcaacgcatgccataatgttcggtcactcggccaaaatggtggcccacgaactacggctgccattgccctgtgacgaggcgctgtgggctgcgacaagcgccgccgaggtcgctcgtgtacaatccagtctgcagtcgcacggtgtgcgaccaattatgttcctcgacggcctcaagcgcacactcaatggccagcccgtccggaccaactcgtttggacgaattattatcatgtcgggcttgctgagtgtctgctggcatctaaaccagcgagacctgcagattagctcgctcggtgtgggccagactctcggcggacgagataaatggcgctcagcactccttcgggcattcgataactggcgccgcgacttcgacgaagccctgggaccgtcgaccacatcggagtcgcgcaacgtgctgcacgggctggcccatatgggctcccatgtcgatatagccgatctgcagatcttcgcaggtgctggccggttgatgggccggtctatcacagcgcgtgactactttgctgcacgggaaaagaccgagaaatgggcgagaaaggcttcagcgcgggatgccacgttcttcgcgctcaaatacctatctgcctgtttcttagacccggctacacaccctggggagtatgctgcgcgcgatgactacgtgttaaaccggccgtgggtcatgtatttcgcagctctggtggtgtggacctacgggtttgcactggacggccccttgcgtccttcccctaccctcctgacgttagcggaccgagagcgcgacatgcaggaatttctgcatcgcgtgggagaaatccaggaacccaacgaattagaggccatgaccgggcgcaatgggtgtctcggcctgctaatgattctccgagactcctttgccaaaccgcgatgggagttactgggagaagcggcgcggctgctggacagctgcatcgcaaagctgcagtcgtagcatgtatgaatgtgtttatataccaagagatgacgtttctattattccatgatctggccagcaatagaagtatacaaccccctaaatacgcccccctgtagcggttgccctaacaaccaccgccgatcccacacctagttccccccctcgaccttcacctcccaatccgcatttttgtttccaatctccaatctccaatttcgcaaactatccaaccaaaatggtaagttcccaaattcctcactgttgatagacttcctattcaagcggtccaaccgcaaccccttcccgcccatgtaaccgctcgccccccggatttcctccccctcatcaacaactgtgtcaacaaggcattgccagctctctcttccatcttcatcatggctaataaaatcgatcaggcatccacaaactacaaggaagcgttctcgctgttcgatcgccgtggcactggccgtgtcgctggtgacctcctcggtgacctgctccgcgcttgcgggcagaatcctacgctggctgagattagcgacttggagaagtccgttggcggcgactgtatgtttttattctttgatttatgtattagttggacgcgatcgcgtctgactatgaaaaaggaattcctggctaactctctcgttcgctgcagttgatttcgactcgttcctgaaagtcctcaaccgccctggcggtttccgtgagcccggcgagccggaggagtactgtcgtggattccaggtctttgataaggatatgaccgggtttattggtgtcggacagttgcgatacagtatgttttctgtttttgtcccaggcaattcggtttggttggtcgaaaggatattgctgacattccacgcttgcagttctcacaaatcttggcgagaagatgtctgacgatgaagtcgatgagctgctcaaggctgttgacactagctcgggcgagattaactacacgggtatgtttcgctgcgcctagagtgggctatgtgctatattgcatctgctaactctctccagatcttgttcgtactatcctcgccaactaataccccgatatgattaacgttcgatatggaaatggctttgccttggtggattgaaattcggcgcgttggaaccttcgtcttgtatgtttttattatcaaatacactgtattatgctgctccggggtatcgccttccgtagcgcgtagcgcatagatatagatatagatctaatctacatctgcatctgctagattgatcgcacctctataaactccactcccatctaaacaacccactccctccactccctctccccaaccccctcaccccccaacttctccgtctccaccacagccccaggaagaagataaacagccggcggccgctcctcctccccctcctcctccccatcccgcgcccctcccctctccctctctcgatccccagtagacgcccaatgcaaccgatccaaataataccccacaacaaccttgcaccgcccacacctcaacagaatcctcttctcgatcccgtcttcgcgccggataatcgtcgcccgccggtccgggatcgtagtagccagcagaagcgtcgtgtggttagagacatgccttgctcttgtcttgcgcgatgacggttctgtttctgtggtcctggcttcttcttcgaggtcggcttctatatccgcatctgcgtctgcgtctgttgagctcttgcgctcgaggggcagaatcagcgctttgtcttttccttcgccgccgcgccgcggtagggtgcttatgttgcgggttgttgctagcaggaggtggttgcagaagcggcaatgttgggtttggattgggagacggtggtcggtcatttttggaattggttattgactcgcgcttttgaactgataggagtcgggaatttggagctgctgcgcggaggcagattgatctcttatgttggtgatgcagagctggggtcttggttagtcttttgcgcggggttcatgaggaaatatctttctgctggcttagtaggtacttaccggtgattggatacacttgtttaatccgagactctgtgttgtcttgtatgctgaagttctaaaatgagacgatctagaaaaagagctgttgagttgcggagaattgcagaatggcaaggcggtgcgcttatcggtatctacagctaaccttggaacttgttagctacgatatagacagttcaagtagaggagttattggcatgctgctcgttattcatgagcacaagatacgcattcggatagctctatataatttaataggtatagtttatagccgttcataagccccgatggctgtaaatgctacgcaccactttacgccagtcccaaatccttgtagaatgcatcggtccgaggcgcacggcctaagaactcggtcagagtcttcatctcatcctggctaccacccttctctagaacctggtagcggtagcgacggccagcagccttgttcatgggatcgtccttgaagacggtgtagaacatgtcggtggagtaaacttgggagctgcagagcgaaatcatcagtattcgaacattgaaaccaatcacacaaacttataacttacctcaggtatccgtagtatccagcgtcgtaacctccgatcaaatgtccaaaggtcgcctcgccgtggccccactcgtcgccagcgccctgtacttccggtccgtccatctgggtaatctcatggcggagacggttgtatgtcgcagacagaggaagagcctcaatgtcggcgtgggtcttgggctcgtggacggtcatgtcaaagatgccgaagtgcagctggcgcaggttgaatagggagtcgttgacgtgcttggtgcgaatcaggttggcaatgacatcgtccgggatgcgctctgacggctggctggtggcagcttcgccctgagcctccttccagctagcaaggtactctggggagagggtggagtagtgtcggctcagagagcgcagctgcgagggttcccagcaccagttctccagcatctggctgggtgcctcgacaaagtcgcgcactgtgctggtaccgtggaagcgggagtagatggttcgggacaccaggtcgtggatgccgtggccgagttcgtggaagagggtcacgacctcgtcgtgcttcagcagactaggcttcttgggctggggcttggtgaagttgcacaccaatgcggtggcagggaatcggcgggtaccatccttattaatgaagcccggctgcaggttgaagttggctgcatggccatatttgccctcgcgagggaacaggtccaggtacaggtatccaacgaacccactgcccgcgtcctcatcgttccacacactgaatacttggacatcctcgtgccagacaatgtcattgccctggccagtgggggcaatggctgcccggtcctcaccaatgatctcaacaaactccagaccgaacagctcttcgaaaatcttcagcataccttgaatggttgtctgcaaggggaaccactcagcaataagctggtggtctagcgagtagtccttttctagcatgagacggtcatagaatcggtggtcccacaggtagtagcggccatcagcattggggtccgtggcgttcttcaaatccagcaacttctgtatctccttcttcccgccagcggtcagtctgtcccgaagatcacccaaaaacttgttaacggtctctggggtcttggccatcttgtcctcgatacgaaaggcagcgtggttgggatagccgatcagacgagccgcctcatcacggagtataatggattcccggaatagcggcacattctggttgcacttgttctcattggcgatcatgacttgccggcgagtctcggggtcgctggcatatttcatggtggggaagaggtcggggtacttgaacgacagccagagcttgccggcgttctcgtcctcgcccttcttcaggccgtccagaaggtccttgggcacaccagccagctgctccggggtaaaccaaatgccgccgttctcctcgttcaggttcttctggaattcaatgctcagctggctcagcctcttcttgatctccttgaagcggagccgatgagggccatcgggcaggccgagtccattacggatgaagtccttgtgttccttctccaatagacggcgtgactccggatcgagaatctcgttgcggcgcagtacggcatcgaccaaattgaagacatcctcacgcatgaccgcctcaataaagaactcatccatcagctcttcggccttggaagaagcatctcgcagcttcgagtctgttgatacagcctggtagaagcccaggatgtgtgactctagtcccatctggttgtcatcttgggcgagaggaaggacaaccttggcaaaggttgcggcctcgggcttgacctccgccaccaccttgtcctgaatggctcgcgagctcttgatcaagcgctcggcatcagctagaagtgactgcggggttgcggtaaagacaggcggggcctggggtggcttccggaggtgagcgggggccatgctggaggtcgtcaagagtcgtattggtacgttggtacgtaagtggcccagcgcgtatgagaagcgggcggggagacggaggaagggcgccacgatgaggatggcgaggatgacgatgaggagatgaaaacgagcggtgaaagcaatgatgggcgggtttgaatgcggtgggggaaggacacttggagatatgcagctgtcaggtgatctgaagctggtgattgcggggacagatatctacacttcttggcatttgtttctgcacgtccttgaattactctatatactaccaatagtttagttattgcatatggggtaaaacagtttatttgcaaagctaaataactagttaactaggtgatgtcataacttactaatgtataggttatttctaaccttggagctagaataagtagaaagttaaggaaaccacgtattctgccatgttacttctaaagtggaggatggggcttttgccaggtgtcaagacaatgtcgactaccccgtagatcagatatcccaacataataataataggcgtccggagtatcccgtacgcagaagtgacatgtgaaaagcaccgccccgcacttcgctcgctccaacctacagctcccctcagtttacaacataataaatatttcaagtcaaaatgatccaaatgaatatgttcatataggaatgaaaattcgtttctaattcatgattatctatgaagtgcgtcacaggtcgcttttgatgaacgaagaaagaaatggaaagaaaacgccaactccgaccaacccacaaatgcaaaaaaaattgtcatcaagttcagtttaagctgcatcggcagtggggattggctcaggcatcttagtgacctgttggccggcccggatgatccgctggcctgtctcgtcgcgcacatattcggagttctccttctgagcgcgcttccaaatctcaacctcaccgccgccacggatgactccgacacgcatggtggaaagcaagttgtgagcaccgttggagtggtagtaaacaccaccgttgaacatggctgtggcgtccttgccaaggccggacttgatcatcgccttgccaccggggtggtccttgatgaaatcggttacgtcgtgaacaactccggcaatagagatgaggccacggccgttcttggtctgctcgacatagtcctcccattccatgacgggaagctggtccaggggagtaccccagtcgagcttggcgcgcttctggtcgatcttcttctgcaactgctggacgcggcccttctcgatttcgttggagcggaactgcttcaagtcgtaggccaggccgagctgcttgcagatccaaatggtccacttggtggggtcgtactggtgccattcgatggcgttacggtagtcggaggggaactcgtggtggaagttgtggtagccctcgccgagggtgaccagggcggtgataatgtgatcacggggggagttgcggtcgtcgaagggctggtcgccgagccagtgggccagggagttgacgcagaaggtagcctgttgcacgaagaagatacgcagaataccggcgtacacgaatccgccataccagtcaccccagccgagaccagcgaccagcatggggacgatgagacccatggtgagcacgaccttgatgtagttgcggtgttgccagacaacgacggggtcttcgttcagatcggtgatatcagtgcggccaattcgcttggggttctgcttcatgaccatccatcccaggtgcgagtacagcaaacccttacgcacggagtaagggtccttgtcggtgtcggtgtaacggtggtgagcacggtggtcccgagcccaccaacggatggaaccttcgacggcaccgccgccgaccagagcgagccagatacgcaggggcaaggtggcggaataggagcagtgagcccagagacgatggtatcctgagaacggagtcagctcgagtcaaaggagtatacttctaattctgaactacttaccagctgtgattcccagtccagtgaagaagtaatagatgacagcccaaatagcagtcttcagctgcagaggcacgaagaacgcctggatgcagcccgtgaggggaacgccgatgatgaaagtaacgttgagccagttgacgtgcttgtaccagttctggcgagtcatctgggtatcagcaatgtgcaccttcttggtgtcagccgcccgagggcgtgaagcatccagcttggacgacatggttgatgtgtagaaggttggatttcaatccaggaggaccaaagggttttttatactagggcccacttgggaccaacgttggggagcctgggtcttgatcgccaacgtatgtgggaggaatagggctgaaagacgaatcaaatgaaagcaaatgtccagcgtcacgagatcccgaggcgaaaaggaacccgaaacagaaaagaattgccttgaaagcctacgctgggagacttttgcgcaaccctttgctcggatgtggcgtgcctcatcgctttctggcgaatgttgggtccagccagccccaacgctttggtgcctcaggcagtcatggccaatcagcgcgcgacggcaaatatgtttatgtcagcgctactcccagcagagtgggagccacgggtgaaggttaagtccaccaacggttatatttaacctcgggatttctaggaattatgctgctttcatccaatgacgtttcaccaagaggtaacattaataagacgccgcatggagctacatttctagttaacctacggttttcccccggtcgcctccttccctcaggcagagaattggcaatcgtcatacaataagtcatcgcacgttagagaatgtgtgagaatcgcgatgcgtacttgggcgaatcttattgaatgatcgaattctggtcatgtcttggccacccatcttctcgatgccgatcagatcaagttccgacgacgcgtatgcaggatgtgacagggaaatatataccacggtgaaaatcgaatgtagtgtgcaatcacaagctaaacaaaaatgcggatatagcgtgaaatcataagctaaacgaaaatgatgtcgtgttggtgtagaattggtatatcgtcatggacacccgttgagttaaacattgttgaaagagaagaagagtcgatgaaaccagccagtggcccgtggggatatacttttctggaacacgcgggatatccgagcctcctgccaaagtatacatactgggtaggtacctcgatgtactccggaggtatgaggtgcatgtatgaccacaggaacaaatcgagataatcacaacatctgatctcatatgatacatatcaccacatagtttcgaatatccctcggtatctcataacagtctgataagaacgaccaggaagccgacgtgaggtctgactcctaaggtcggagccttccacctcgtatactatggacggcaccctccgactgccagatcttagataaacgaagatagcagagaacgtttgatgatatccgggttgtggagagtaaggcctcgtgtcaggatacgtgtatcccgtacctggcaaactgccaatgtccctcctgaccaatgagatcccctcaactggccccattctccatctaaatacacagccgtgaccatcccgaaacacataatatgggggaactcgggccctttgggctaaccagaacaaccatgggccttcctgtatccttatctttccccactcggccctgattggctggcctcccaagataaagcaggggccctaacgcgatccagacaagcggccaccaggttatgcgatgctcttgctaattgtcccccaagtgcagtctctaattgcctggctgccggtgcgataacagaacctgtcaggttatcccttccactttggtggacggtggatcccatgtgttcttagtcagcgccccgaattttgaattttagagttaccgaagctcggggtgtataatttttttttttttggaaatttaaatataaaacctctgtcccggtgggatagttcaatatctacattcattatatcgaacattcactatggacggtccagatcaaatcggccccgatcattcgcccaagcgcacaatcagcgacagactgcgctacacggtcaagaccttcactactcggtatggcttcaaatgatgtgttctggaggggccttgactcacaatcaacagagagggcctactaggagagtacgactatggatacctcttcatcccacgactgccttttacaaagcgagctcgcaaatctgccccgttcttcggtctcgaagatcgcgtgccagtcgttctggcattgattctggggttgcagcatgcgcttgctatgctggctggtggtgagtcccagagacacctacaatatacaagcaaagactaagagcatcagttatttcaccacccattctactcggcggctcagccggtgccaacttcggggatgaactctaccagtacctcgtttcgacttcgttgatcgtctcgggtctgttgagtgctgttcagatgttccggttccatatcaaggggacaaaatactatattggaaccggattgctatcagtcgtcggtaagagcttctcaattcttcagatcctcgcttctgatactaattgttcaaacaggtacatctttctctacaatcacagtcgctcaaggcgccttcgcccagatgtataaatcgggatactgtccttcatctccagatggatctccgctcccctgtccaaaaggttatggcgccctcctcggcacctcgtgtctctgctctctcctcgaaatcggcatgtccttcatgagcagcaagatcctcgcccgcgtcttccccccactcgtcaccggcccaactgtcctcctgatcggtgcctcgcttatcaagtccgccatgacggactgggccggtggcgcatcatgtggttcggacccctccgcccgcgcattgtgtcccagcgctagtgccccgcaccctctcccctggggaagccctcagttcatcggacttggattcctagtcttcgtgacgatcatcgtctgcgagcggtggggtcctcccattctcaagagttgctccgtcattgttggcctgttggttggctcgatcgtcgctgccgcatgcaactacttcgagtccgccggtatcgctgctgcaccagtggcttccttcgcttgggtccacacgttcccgctgtcggtgtacccgccgctcatcctgccgttactcgcgctatacatcgttatcatgatggagtctattggtgatatcacggcgacgtgcgatgtctcccgactgcaggtcgagggcgagaccttcgattcccggatccaaggtggtgtcctgggcaatggtatcacctgtctcttggccggtctgatgacgattagccctatgtctgtcttcgcgcagaacaacggtgtgatcgcgctgacgaaatgcgccaaccgcaccgccggctactgctgctgtctcttcctggttatcatgggaattttctccaagttcgccgctgcgctggttgcaatccccagtcccgtgctcggtggcatgaccgctttcctcttcagttccgtggcagtcagtggtctgcgcatcattggatctgtcgaacccacccgtcgcaatcgcttcatcctcacggctagtttctccattggaatgggtgtcaccctcctgccggcatggttcacttacttcttcacctactccggtgacaatcatgcgctcgctggtctgatcaatgctgtcgatctggtcatggagaacggattcgctatctctgcgcttctcggcatcttcctcaacctcttcattcccgaggagcctgatgatgtccccgccatcttggagtcgaccgactccaatgagacccaggtacagaccaacatgcctgaacagtcgtcgacgactaccaaaatggcttgatcttgcgagccttgtatagttcagtcatataatgagtttgtggggccatcattgccctttttagcgttatttaatacctacaatgcaactttacgttgatatcccctgatattttcctaccctctccagtatctaccaataaaccctcaacctaaaaatcccaatatcaagacgaaacccgcgacttaaaaaccggcctcggctgcaaattagcactagccgtcaaactattctcattcccaaacccaaaacactccctctccaactccccgatatcgcagcgcacaaacccttcatcaacaagcacgcgcagcacagtaagtatccacactcgacacgtaatccccggaattgcattaagacacccatcataactcctcataatctcatcgacacgcgcatgcgtctccggcggaattctcgcgatctgaataaccacgcacaggaaattctcggcgaatatcgacgccgtcgcctcgtgcccgggaatccatccggcgccgatgccgcgcgcgtggtactttgttccgcctggtgtggtggctgtgcctttgtgcaggtagaaggcccagtggaagtcgttggggaggggtgggtcggagcgaatgtagaggattatgtggagggtgtttggggggagacccgctaggctttcggcttgtttttttttggtttcggtgggggtttgttttgtttcggggtgtgtttggtcgggcattttggagtggtatagatggattaggaattaggaattaatcaaatggaatggaatgagtaatttgaggatggtgaaatgggatggaggggatggctgccaaggattgagaatacagctggatggagggctgttgggctgattataactactactgataatggggggaaaggtagaagcgctgagtctgaagccctataactgtataggctgactcgtgacacagatgatgagagtctagagaagagagagagcctctagctacccgaactaggaccttcactgccagtaataagccttcgggccgtctttagtggaatagaatgtttgcgttcgagctgcaatgaagggacgctgggagtggtacaacgctggcaagtattaggattatataaactatactactattatggaatttttttacaccccctcgaccttctccccgggggccaacatcttaatataccggtgcaccccggtctcaagaacctcaacagaatccccaaccctaaccacaaactcctccttcgcaggaacaagctgcatccctaaacacgcattggtccgatcgccatcatcaatccgccgatacgactttagcgtccgatccggctcagcattatgtctatccccggacagcggatcgacattaggcagtcgacaccggacagtccgacaagaagcgtggatctcggtaccgccaatagcaagccgcttccagtgatcttcctcaaaagcagacgggccttgaatgatgatgttcgcgcggaaacggcgaatgctcaatcgcgggattgcgtaggcacagcgtgctgctacatcccggtgactggagatgctgagcaggtggattggatacgcgtctgcgaaggctgtgcttggctggaagcctaggtcttctttgcgcggtgcgttacggaagatctgccgtgaatggggtgcactggcgcggaagagtgtcagggtcttttttgatgggtcggaccctagatatgcgtgtaatgatgctgggagcagtctgccgtagtcatgggctaggggcttgtctttccagatcttgactgggactagtgggaacttggagtccgcggggggaagtagcgggacttggaatgtccgttggcttttgaggaacttgagtgccatgccgagcttgatgggcagacccttccatcctgctggcggaattcggggatacgatatcaacatcacaccctgcgacttgacttctgacaggtctgcgttgtaatctggggcagacgggtcaggaacccagatctccggatggatcaaggctagacaattgaagcttgcatttcgcagggtacgaatggtccattcgtcattgatgtactctgcaaagacgaattgtctatcaaattcaagtccagttggtacgacgtttgagacttgcagctcgactgcgccacaggatttgagcgggtagctgaacaatgcctttacgcgccaggacggacggccgtgatcatcttgattgctaggtagaccctggctgtactttgagtcgaactcatcgtctaggttgctttggcctggcggaagtcctaggcggcgacatcccttgggattgattggcgctgtcagtgttttcaatgtcttcagagaaagaaaaagcacagatagaaagaatagaataaaccaattggggacgatatcatccccgagggaaatgtcaacattggacatgaggagtatgcaggactcgagatcgaaagggaaaaaagtcccgccctcggatctccgaaccgtcaacattccactgtcctacttatgatggcatctttaatgtcatttttagagattgaatacagcgttggagcttgaatttgtttccatattcttctactaaatcgggattcattggctttgctgccagtcatcctgatgcgcccatgagcatcaacatggaccttctcggtctagacggtctcgaagggttcgaagatacgcgtaagtaattccccaaagccttagaaaagcacaaacattaatccattcccagcgcccgtggtttcgatttcagcgtctcagtccctcaacgcgtcggccgctacccgcgacccgatcgcgacgggcctggcgcgtctggacgaggctctcaatgacctccccgaccagtccaaccaaggcggcatcctgcgtggacatgttacagaaatattcggacccccaggagccgggaagacctcgctggcgtgagtgcacttctacccacaccgccacagtctgatttaatccagtcacaggttgaatattgcatgtaatgcactacgtgacggcaaagtagtctggatcggtatgtgatcctgttagttcccagagtcagctgcgctgccctgctcacaccgtcagatacgggatgtcccttgcccagtctccggctggaggaaatgtccgtcaacctggatgactttgtctatttccgggcgcatacgctggctcatctaatagccctgcttgcacgtccaccaaaggggtttccaccgccggaaacaaaccttattgtcgtcgactctgtgtcgaatttatttccagcttacttctccagcgcccaagagctcaaggaccagcctaccgagggcaaattcagcgataaaacacacctgcaatggctgatcaatcgcaaatggaacattgctagcgagctcgccatgcatttggctagactcgcggcgaaaaatattgccgtgttggctattaatcaagtccgtacggagatcaagggtcaatctcacgcagttctgcagccgctcttgtcgggcagcgcgtgggaggctagcgtacagactcgcattgcggtctatcgtgacctgccggatgagcgatttgcagaagttgagaagcgcgcgggtaagccattgcccgagcaagccgggctgctcgttgcgtttcgcattgaaccggtatgttgtgtcgatctccggcccactgcatgcgattgtgcttataatctgtctaggatggtctttatgaaacagagggaaaggaatctccgccctccgagcctctgacccctttgccaaagccctcttccgactttgagtactatgatcctcctaccccgactccttcgcctatatcctctgtgctgtcttctgcgccgtcctccgcggaattggagtctccaagcccttcaccatctaagctggcgtcgccagaacagcctgtacataccccaattaagaaacggaagctggaggaggtagccgatagtcaggatgaagactccgaggaagagaatgtcccatggacagacgagacaaccctgaacacgaattaaacatgaaatgattaattatttcgcgcaattactcgcttatcagcgccataagatgctatagaaaatagtacgatgtctctcatttctttgttggatatctctttcaatgtctatttttggtatgttcttatagactatatcttttttttccacatgcaaggatgaaaatatccacaaaatagtcaaatctctttgaatcgcaaatgttttttaattaaactaatatcggacttcgcccccaaggccgatgccggacgactattgaatgttgatctatccccttcccttgcccccgttaccccagattttgggtgcgaacttgtaccttaccaagtactctatgggcacccctgaacacccttgcatgcccaaggcttctttttgtttgtttccccttcactcgttcagacaagtccaaaacctgatctcctgcatgacagagcacattgtacgaccagtccatatcccactctgtatccgctctttcgccaattcgcctttttcttccttccttttacaaaaaacttttcaattccctgtttgtccacgagaacatgtggacacagcagacagggtgaaccagactccctcttcgagtccggtcgctcatatacctccccaagccccgaatgagtctcttctagaatcatgtccgacgttcccctggacatgctgaacgggatatccggtgcgctcgcgaaagaaggcgacgtacgacagatgatcctcgtcgccttcatcggactatcatgctacaacgtcgccgagctaattgtcctcgtgccagccacattccgccggtggcgcgggctctatttctgggccctgctcgtctcaggcgtgctcggcgtggtaccatactcggtcggcttcctgatgaagttctttactcacacggactccgtgctgtcggttactgtcctgactatcggctggtggacgatggtgacgggccaatccgtggtgctgtactcacggctgcaccttgtgctacgagacgagcgcgtgctgcgccgtgtattgcagctcatcgtcgcgaatatctttctcctgcacgtgcccacgacgatcctcacttacggcgcgaatatagtgcacagcggcgacgacgcctggatcaacgggtacaatatcatggagaagatccagctgaccgggttcacgatccaagagagtctgctgtcaacgctgtatgtgattgagacggtcaagctgctgcgccttggcgcggatgtgtcctcgcgcccggatgcacggagcatcatgtaccagctgatcgggatcaactgcgcgatcatagcgatggatttggtgcttttgagtcttgaatatgccgatctgtacgccgcgcaaatcaccgtaaagggtttcatttactcgctcaaactcaagcttgagtttgctgtgcttggtcgtctggtggatctcattcaggggtctagacatcctatctccatcgctattgccgatacgttgcctctttgctcgatgcagaggccgcccgagacgcctgatcgcggcgacgatgtgctttacgagcaggctgagccgaaggactttttggctccgccggtcggaggccgagttgttcagaggaggatgtttgtggagtctggaaggacggctttattagcaatatgacggtataaatataacaataatgaaatcgaaccgagctagaactggatattgtgtgtgtagtcctagagcataagccgtataaggagatgattgtgaggaatggaaataaattagaaatcaggggggtggctcggaccatctcctagcgcttcaaagcgtcctggtttgctatcaaggtacggagtaaagagacatgaagtagaccattaggtaggtaactgtctgtaggtggcatgcgatttgtaataggaaccgtcaatcaccaccagacaaaaggaaacgtttcattcgaggctacataaattatatgctctcgttcatagattggtcaggtagtcctcgatctgctccttggtcaacttgcggaaccgtggtccctgagcaccctccactcccttgaagcccagaaggtggtccgctggggggccgacaatgcctggaacgatgttagtcgatattcaccacaccttggctagctaagcagccagaaggaaagcaaaggaaaggcagaaacccaaactcaccaatttctattgtgtcaccattcatctcaccctcgatcgtctccttgagtgtcaacaacgcgatatggatggcatcttccaattctagcccttcagtgtaccgtttctcgaggaacgtcttggcgctcgttgcgtgtttgccgatggctgtcgccttccacgggtagtagctgccactggggtcgacctggtacagactgggcccacccttctgaataccgccagtcttgctggagatcttctcctcggggtcatccttcttagcctcttctgactccggctcaacgccctcgtcccagcctgcgaccagcagactgacaccgtacggtcgcacaccaccggattgcgtagcttcctgcactacccgagcgacgtcttgaaccaatatacgagtaggtgggtattcgttgtagatgcgcttgtagcctgtgtgcgagaccttgcgggccttgtcgaccagcacccggtagtcagggcccatgccggcgtagaccataccgatatccggcgtgatcagtgagatcttggatagcgagggaggatcgatcagaggcgaggatgacttcttctcagtcgcgaggacaatgccgttcgtagctatcacggcggtcagcttggtccatataggtgagcttggacgttttcgtacctttgataccaagggcagttacaccctggttgaccgcgttcaaggcatattctatatagatcagtcatcgatgcttaagctcagagacgatggtccataccaatttgcaccagctttccgctgtaatggagctgagttagcacgctgtcaattaaacaggacaagtcgtccttacctgggggagaatgtcgtcaaggagaatgagtatcggtcagccatgattcgctgttaataggaagagaagaggagaggatggaaagatcaaaagaaggggagctgtgttgtaggcagagatgggtgacgtttggcgcggtagagctcatgaaggcggtgaccagatcgggattagccgtggggtttgggacaccttcggcttttctgcttttcctcttcttctagcctttctttttttttcaacatctcaaaaatgaaacagtagctcggccttctcttgtcaaggttcgggtaaatttcgatgtgagaccaatggaagacacacagcattaccccccgcgggtctgtcgcatctgcctagaaagcgtgctgccgactttcgaaccctcagaattcctccagaagcctcgagtggtttatcaatcttccgatccagaatctggccgtctgctaagcccttgccaatgcaaaggctcctcgcgttatgtccacgagggctgcttgcagtcatggcgccatgccgaccccaaatatgggacaagaaacttctggcaatgtcccacttgcggctttcagtatcgtctggagcgtctgacttgggctcggtggatcagtagcaccactgcccagctaattctcacacttggcattcttttgttaaccgtattcctgcttggattcatagctgaccccatcattgatttctacttgggccccgtggatgtttacgccgaattggccgaggaagatgcctcctggttaggacacttcctcaaaggacttgcctctttgggcctattatcattcctcaaggcgatatttgcgctgtcaccttttccttggaatctccggtctgtcgcatcagggcgcaattcgggccgtaaccgggtcgcccagttgaactggatagtggtcatagttggcattggcactttcctttgggtatgtgtggtcacattgactatatacgacttagctaacgcagacaggctgtctacaaaggtgttcgttcatggagtagacgaacgctagagaaggctggcgaacgagtcatggatgtcccactaccaggtgacgagagtgacacggacgtcccaataccggacgctggaatgaaggaagaatagttcaatgaactcgcactacttaagttgccgtactcctctgccccatgagacgtcgattagtcaatgtgcgaagaacaataactgccttcattaactcttgattgtctgcctgagaagtagatggttggctcgagagcgtcttgttctcaagtcattcgctgcttcactcatcaggcagctttcttggggaaggcagtccaccactcaattgtaaaagagcgtcctgaccattgagtctgatctattagcgcttttggattgagcagcggtaaattcatgtatagtcatattttctattgaatcttattgtcacatccattgtctattgtccattgtcacgcgtgtgccttatttagtaacttgaatgcattattatggcagtcagtcccatcttacaaacacctctcccatcccctcttccctcttctccccctcatctaacttaactctcatctcatcttcagaatggatctcacactagagtcccaagccgcgattctttcctctcaagtcgcgatgggcctcgaatcagagggatctggatctgctcctcatgcaaacaccgagactgcaaacacagagaccgaaccattccctgatgctgagccattccctgaatacaacgagtccgagtgtgagatgcttgcatcttccatcgcagccgacaagcgccatgaacaagcatggatccacgctctcggcagagccgcaaagcaagagatccgcaccctccatgtcgatcccaacattatcccgtatatcgaaggcgacccatctcaccgcagccaggtcatcctcgaacagctccgagaccttctcgctgacccgcgactgcgtcatgagatccgcgggcaatttattaccatcgtcaatgccacccttcagttcaacttcatcatctttcaccaaaccaaggagcttctgcctctcaaagaagttggagacgcagaacttcagctcgagaccgttctcaaccatgttgaatttatggatgagatgcttagagagcagctgaagtctgccgaacaggtttcttataccctcgagagcgtctcgctggagggtacgtcggactacgaacgactctgcaagatgtcgactgtgttcgctaagtaggtgccacggctcttgtttcttgtctaccctttgcttcggcagctctgatacgcagaacaggaccatgaaaaagccccgtctccttgaacgacaactgcttgctttgtacatggacatgtatgaggaatggatccgcactcctttcgtccgtctgcgtaaccgtcagatcctgactgaacagcaacctagccccacacgcgcaaagctttcgcgtcgtatcattattgtctgggagctgatgaccagatgtatcgaaagctacggtaccttgaacttgctgactcttgagatcaaagaacagtactttgctccggtgctgggttatctttgtgactcgccagacatatgggagcactgctgggatcaataccaggcactcgagaaggatcgtcagcaaaccgagcagaacagagccgctagccaagaggatatctgaacgatggatcaaagagccactggactgtggcatggggtatcttttccatatctacgattttacgatttgtcttcagttcaataccccagatgcaatgttgcacgcgacacagcgaatgcataacgaaatcaataggaacattccaaatcatctttcccataactaacctcaagctgtactatccttataagccccaagcttaaacagcttcttcgcattctcccttccaatcttcaaccgatccgtatccgacatctccgccgaatcaaaccactcacacgcatccccgaacgtctcaaacggataatcaatcgagaacaaaatccgatccgccccaacctccgccatacaaaagtgaagcgtagtcgtcgagaaatgaccagacgtcgtaatccacaaattctccgcaaaatactcccgaatcgtccgcttacacgtctccgcaagtcccagcatcttctttcgatcctcaaaccagtggttaatccgccacatatcaaacgggatatgctcccccaaatggccaagtataacctgcagcttggggttccgatcaaacaccccattcgtcaccatcccaaggacatgcagactgaccccgtgcgcgaacgacagcggaggcccaatcagccatttccgatcagcccagagcttgtcgtagatcgtgcctgtggggttgcgcgggtgcaggtacagcggcacgtcgagttcagtgcacgtcgcccagaacacgtcccatttctcgttgtcgtagaagatcatgtcgtcgccgtcgacgcccgcacgctgtgtgtcgttcactagggcccctaggaacccgtgctgtgttacgcagcgtcggagctcggcggctgcttcttgcgggtcgtgcatcgagagcgtgctggcagggttagctggatgtaccatatctatcatgcaagtattggtcttaattatggatttgaggaaacttacgcaaatgctgcaaactgatcagggtgcgctttcactttctcggcgatgtagtcgttgatctcaacggccagtgcttgcgcctcctttgcgtcccagatgtcctgcacgccaggtgctgtgtagctgaggatttgaagaccgacgccgtggcgctcggcaaagtcaagtcggattggtccgacgtcgttgatctctgctgtgtgcttgtctgtgtcggttgcgaacatgcccgcccaccattttgtcttttcgtggaatcgggggagcgcgaaggcttcttcgagggcgattttgccgagcatgttggtttttagtaagggagtaagggaataagtcagtaaggaagtagaaaggcttgaggatggagataatctgtatgattatcagctgttttatagtaaatgcggggaccccgcacttcggaagcgttcaggctttccatggttacgttggatcatcagccctgtcaatcggaatgcccatcggaatgtcaatcggatgtgaaacctgataagtacattgcgtatacaaggaaagcatccgacggcggttcggtgtcggggcggatgcgggtagcggttggcggcggagatggtcaaggacatattattgtttcctaatctaggtcatgtctactacgtaatatctctagccacagatcgcagcccaatcccatgagtaggtggatcgcgtttagactgaacgatttcaatcgcttcttcatcgatcaggcctttggcgaccaaatggctgacatattccatagtccattcttgacaccgcttgttggtggtctggaaagccaagtgtgtgagcttgattcagacgttaagatacttccatagaatatatgcccattcactcacatcgtcgacaggggccatgaagttctggttgatccccggagtggggatttgtgccgccgctagttcgatcttccctcggggggtggagtcgatggatggagctgcatctggggaatcaacgatgtcggacgaggcgacctggccgattggaaaggttcggtcgtgagggtcgagactggggttgtagtttcgtttgaattccaggacgtagcctgccatcggtgccccaaccgcgtggattttggttccccggtcgggattggtagctgacgggacaaatattgagaagtgggctctttggaagggtgtattgcgagcagagatgagataaatttttcttgtagccatttttcttgttggttgtagttgattgcagagggagatggatgtgagatggtgaagctatcatacacgagtcatgtggctaaccatcccaggtcagtaaaaaccagataaagaaccagtacataagagtaaccaaaaagacatatagctaagaccaatggtcgtatattgagaataaaagagagatgaagatacagtcacccgtacttccctgatgaatagagtgaggtacccaatgcttgacaaggataattatactcaatttgggtacatttatttcgattttcaattaagaagaactaatatttgttcagacgctaatctatacaacgtaggctcggagaaaggaaaccaaatgagaataacacatagcagcatacatgatgacaggatccaagattacttcgcaacaaacttgattccacattcctctttggggcgacaagttgcagaatcattccattcgggaagaggaagacgattgatccttttgccctgcccgtcaaccatggtaatatcaaaccgcatcatagcataaacgaccacaagtttcatactcaacgtcgcaagtcgctggcctttgcaagcatgctttcccgcaccccagccaataaatggtgtttccttttcaattccccgagacggatcccagcgagttgggtccgggtagtagttcgggttgagcgctgtatccgaaaatgggtaaataacgagagaccccgaggggataacgtatggcccgattgtaagatctgggccgtggttctttcgcactgctgtgtatggctgcgaggtgcgcagtgtttcgcgtatacagaggtcgagattgggtgtttgagattcccaggctgtgagtgggatttccgagagggcttgggcgagggtgttcccagagagagaggctgatgagggcgtgtgggtagatataaaggctctgatctcatcttgaacatttgaggaccaagttgggtccgaggagatttgcatgattaaccatgttactagaaggaataactatcagtgttgttatattcggtgtgaacatcaaacttgcctatcgttccggtggcacgagatccagctagggataatcctaatatgcactttgagagagtcagaaccctgatgaaattactcaaagaacggaaatatggaatacataccccaaagatttggattgtaccatctccatcatcaatcatctgctgtagcatatcatccctcttgattccgctctttttcctagtgttaatggcctcttggacaattctgtaaacttgaacagaagtaaagaacttgtagaacaaggctgggccaggtaaccaaggcaaccaagttgagtatgggttagtgatagagtcgatagtgtcgacaagtgacttgagacgagctgaaagcaccgggtcattggcgatatcaaatgaagcaattcgcatgaccagttgaaaggtgaccttagataaaaccagatgtctcagttttctctactaaagatataagttagatacacgcacctcgtgaagggaagagcagggatcgagaatatactcgctaccccacgcgtccattttacgctggcattcggacagaatcaatggaatcactgtattatcttagtcaatcttcaagctcgagaacggaatagactaacacttctgaagattatcacttcgttgaatcgaagccattcgtctgactacgccgccaacttgatggggatcaaattgagcagcgccctaatgcaagaatttagttgttatgagaccgaagcaatcaccggggtcttacactgcccatcatgattgagaatgtatcatgtaagccgagacccttctccttgaagaagatttttcggccttcattcccagatagaacaatggcggtatgtcggaacagactggtctgatagatagaagatgatgtagtcttgaagccatctttgatgaaatcaaacctcttctcaaagaacaactgggtgaccttccaaccaggcaattgcaagcgcggaagggaatggccactccggggcggagatgccactggcacgtgtagtaacttatacaacaaggcagaaagtagaagaatcaccgaggtcaagctacccaaatattgaagagtagacgagccattgcagaaagcaagtaccagtcgagtcaaagtgctctgcattgtgatgactagaaagaagttacagaattgagactggataagatagtccccagaaagtctttataccccggaatgataaggccgaagcgggggagctcaatgacgacaagtgtatacgccttcccaaagtggaataatccaatgatagcgagccaatgaccaaatctccattgctccttccctaaatgtcgaacttgccggttccagccagcgcgagtcaactgattcgcaccttccctgacctacagctcatgaactagcctattcaagtatatcttggactcgctgttggctgttggctatgttgtcagcattagcgccatgcataccaggatttagattaaagcggatcgctcaggcgggccgttgatgctaatcaggaggcttatacccccattttattttggtatgtcatcatttcctcagagtccggagttgaccgagttctgatgcctacatttcggggtctctaggttagctcaggcatccatggctttgcaaaccctactgatatagtcgacccatgtaatgattatggagaatgattataggcaatttcagagcccatttagcaccgagcatataagagcaaattagatattctttccattatagaaatcatgaggcttacaaggctgaatttgaatagtcgaggcgtgatgaggtgcgtggtccttgccttagccatctaggatcgatatgcgaaacctgcttttgtatgcatgcttcctgactccttcctaattaggcccttccacggtgaacctggggatcccaaggctgtgggaccaataaacgtctgatttcaatcccgaggtcatttcgtaccagagttcgagaatccattttatagaacaagatcttactattctgactatcatcctgtcgacccgtatgtctaactcatattttggcttggtgataatctataacttaagctcatttcttctcaactgacaatctacataggctgagatcaatatcaaattcacttcctatcaggttgcatttactgtagctacaatggcattatagaggccagaaccaacaatgactttgtggtatactccgattggctgtattctagtttgcatacaagcgcatccattctatgcctattccgcgctgttgggtgggtgcgccaccatgcacctggggtccagctgattgggttcggacgttgaccgaatataagataatctattatgccaatcctttatgcaaagctgccaactagagtagtagaggcgaccaataagaagaaatactaagaaaataaaattgaagaaaatcagcatttattctcatgattctcaacgaccaaatcacaggaagccgccgcctccatacaaactgcaagcaaaagcacctagactcgtggcatttctcgagaaattgcaattcggactaatccttctgtgagggggggttacattgggatatgacttccaagtctgttcattagaaataccaatatgtcagagtagttctatagttctatagtaaaacagaaacaaaacgatctaactaaggacattaccccttgaatccatctcttccaatgtagaccaaatgtcactccatacccttctgatcacgcattaaatcccacatcctgagccttgaccaattcctccctctcataaagaacttccggtcgaacatccctcctcaacaaataccgctgtacaaaaaccccaatttgtctcaacccatactgcgcatggagcctcgtcggcacagaaaagacctgatccaactcctcaagcgtcttccccttcgtctcaggcataaacaaaagcaccatccaccacccaaccaaacaccagcttgcatgccaagcaaaagccccctgtattgtaaatgcagcgcgcagcgacggccacgtcacggccagaatgaaattgcagaaccacatggtcgccgtgcctagcgccatgccgtacgaccgcatatatagcgggtatacttcggctgtgtatgtgaatggcacggggccctcgccgggggagtagactacgccgaaaaggtatgttcctgaagcgatgcaggcgagacgtgcgttgtggctgctctctgggatccagaagctgaagcctgtaaataaaaaggccatggacatgagtgggaaggtgagtagcaggagattgcgtcggccgaatgtgtcgatggtgtagattgctggtattgataggagccagttgattaggccctagcctaatgaggcggctagggtagctgcaggagaaaaattggcctagggcttattatgttaactatctgaagaggaaggaggattgatggattggactgacctcgagaaatatctcggaagaatagtatgagataacgttcacaccgcaaaactgttcaagttagtactttgcaattactgctgtatgttttgcgaagatccactcacctgctgcataaacataacaatctgagacgccaacatcgctcgccgatttcgcgggactttgataagttccagcagcttgttacgcccaagcttcatcctatcctcagcctctagaagagtatgcatgtagtacaggtcacgagctgcctgaattttatgattccgcagcacacagatagacctataagcacggtgatactgcttctggcgcatataccaatgcggtgactcaggacaaacaaagacaaaacagcaaacgaccagaggcgggaacatcgccgaggccatcatacagcgccaattcaagccgacgatgacggtcgagtcgacattgtagaagatgaggtccgacgcatagccaaccataatcccaaacgccgtccacacatgccactgcatgaccaacgcaccacggatggacggtggtgctgtttcggccgcgtatatcggcacagttgctgacttggggccgatgccgaagcctagcatgaatcgtgcgacgaacatcgcccaccatgttgagacgaacccctgccagagacaggtaatcgcagacaagcagcatgctatgaatattgtacctcggcgcccgaaccagtggttgaatgggactgttagccaggagctgatgaaggcgcagcagaggtatggtgctgaatttactagaccgacgagccaggcactccgagaggattcgtcgccgatgccgaattggtgtttgtagaatatctgggctccgttgacgaccgtctggtctgatattgtcaccagggtattcctcaggggcttggaacttctcgggctgaatatacttacccattccctggactgtagcggataaagaacacagtgcaatgacagcatacattttccatggctgtgaccagcgattcgtgagctcccggcgcagtactcccttctcctggtttgttagaccagtcacattggcatattgttctgggcactgtgccaacacagcacccaactcgaaagcgcggatatcggattcgtcgcccatctcgtggagctcggctaatgtgcgcccctgattccgcagttcggtatggctgaacccagccaacggattggagagtttggcattgagactgcgccgtgctcgctcggcatctgttccgaatggcgcttgtgggacgaccttctcggacagcatggtgtcaattttcttcttttctggcatctctattttgaagtctatggccaaaaggattgaggagacgatgtttggttttacggttgggaaggactgggttcctgggacaaagaaactcgaaagcaagcaaaacacatgactttagggctctttcctctcatgaatgaagtacatcaatgcaaatgcaggaagaattcaggtggatcttttaaagcacctgtcaaagaacgagacatgaggttcaaggtggactgaactaattgggtattcttgaaagtggctcattgcaaacaaaggatcatgatgtgctgtttacccatttcgggctgcgcctgcgcgagaaagtcgagtagaataaagtcaagtggaataaagtgaagaatgattcatagacttgatggagatgagtgggaagtactacgatgtcaatcagcacttccatctagggcacaatcttctcccatattgatgactaatcatgactagacctcggctctttccaaggtttctttcaacttggagatgttgaaaaagaacaatactacgaactgaataatggaagaaaacatatatgtttattaaaaaggtatcaatttcattataaattaggccagttgtgaaaatctgtgaaaatctgtaaatcatattagcaatgatctcatagactcgacaagagaagaaagtcaagaggctctgtcagataacatttatataacaatgtttatcaacaatatagttcagaacaggtctgtgtgaaaaggtcactcatcataagagcgaggagaaaaaataatataaaaagcacttaaaactcacattctgaaattttaactatcccgtccatgaaataattcatcatatcggagacagcttggcaatgtatgtccttggagaagcttggcaagctgaacaaagctacaagctatgagcttgccatgcacaaccacaaggccaatacggccgtttttgaagaaaaacggccatcaaaactaaaaaaaagacaagaaaggtatttgatgaagaggaaatgaagggaagaagaaaaaatgcgagcgccttaaatagtaaagtggattgcgagtttgcactgtttgcactctaaaaaaaaagtgggagctgcaatttgcccaagtcgatttctttagtttttgtgaaattattttggtgtactgtgtgggcagatgaatatttccgttattggaatcctttctcaaaaattatgaatgatatcgagagccccagactggaggagcaacagagtaagatcgtcctcagaaaataccccaaaaagtctcgactaatcgatatctacattatacagctcctaccaagtctccctttgcaaatgtccgtcccgatggtcgagccttcaactctcccaattggcgcatgaaggttgcaagcccaacaccatcgcgcaccaatgctagcccgagcccgagccccaaccctaaccccaatacctcccgcgcagccttcagccggcccggagcgcacgtcccccaagcgattaacgatgggcgccgcctatacgtcggcaacatgccatacacggccaagatggaggatgtggaggcgctgttcatagcggccgagttccctatgtatgcctgcaccacttgaaacctgctggcccagccgtgaatcgtcgtcaactgaacaacccccgaaaatagcgagcgcatagatattgccattgatccttttaccggccggaacccctcctactgctttgtcgacctacagagcaaggagcatgccgagcgcgccatgaccgagctcaatggccgcgatatgctgggtcgccctgtcaagatcaagcccggtgtcgccaagtctcaggagcgcattcagaacccgcctgagccattccgcattgatcgttggcgccagcaagagaaacctagctttgcgaaggtcaacagtgactccagcaaccgcgtgtacgtcggtggtctgccgcgcttgaccgaccacggggctgtgcagagcaacatcgagcttttcttccggggattcaaggtgtaagtttggatggcttgggtttctgctatcgtgtgatcagtactgatgcgctgtggtttgcagtgagaatattagcaaggtcttcgccccccaccccgctaagcggttcgatccgggcgagcactactatctgttcgttgatgtgggtactcccgagcaagcccagaaagctatggatacactgaatggtcagcaaggaccatggggtggtccgctgcgcgtccagttcgctcgtggtcccaaggatgcctgatctaagtacaggggcttacctaaaaaaagtattattaataataggatgtgtcgcattgtatcgcccattaagcgccataagtctaatgccaccaagcctacgtaggtagacttggagagcaaaaccgtttcctcgtcgaattggctgtctcgctcactcatcagtctgcggccaattcttttcttctattcccaaaattctaagtaattagacccattggtccctccatgattatctccaacactgttccaacactgtccgactttactggccataatacatgactcgctcaaatagcatacaacttggtataatcacagagcagaccgccgctaacacccaaccggtagtggcccagaatccagcaccaaaaattgataacaaggatattccattggacgtcatgatacgcctcctactctagttgctcctcctgtatattagtgagggtggaacagactcctctaggaataaaaccacgtggtagaccgaggttcacgccgaattgttagcccgtagcggaagacatagggcttattactaccattagcgaaggagacatttatactgggtgctatctcgatgaagttcaaattcaagggatttgatgtcatatatagtataatgcaagtaaaagactcacagtctgtcatgttcaaagattctgacatttttgcacctattactccctcttcgtcgcagaccagaactgcgtaactgctcgtcacatcagcaaccgtcctcactcacaagaaattggcaggaactcaccataagtgaacttcagcaacgtctctggctgctcggcatatagactgtcgatgctcttccttgacgtatagtccacatcgaacccgagcagatctgccagctggagcacttcctcagcggagagctggagagcggtgtggctgccccattttagcgctgcgtacatacacgtcagcccgagttcggcggtgaacggatcacaagagatgcataaatgtcagtgttcaaggaagggaggacagtaacatacgcccaagattgatccacaccccaccaggctttagtagccgatgtatgttgcccaagaaatcaatcacgttcttggaaatgtcgatgaagaagagcgtgacgacggcatcgaactcaccgtcctcggggaacatctctaagaagtcgccctcgacgagcttgacggccttgtttggccagtggtccggcaccgttagggcggaatagcgcgaggaggggttggcctgatacgtccatttggtcacaaagggctgcagggtgtgctggtgcagcgaggtcgtatggttcgttagcaggcggtaggccaggatggagccgtagtccagctcattggccgtgacatcgtaccctgcaccgatgtgaggtcgcgccttccactcaaggaagtaaaatagacgcacctatatcagcgatatcgcttgccagcctgcccatgccgcttccgggtacaagtaccttattccctctcccgttcccgccaaaatgttgctcaagcccatccagaacaggcggaaatacggcctgcctctcctttacgccctgtgtgctccaatctcgcgaaagatgcccaaacgccaggtccacaactccaaactccgcgtcttcattgtcctccagtgctcgtgggccggtgtggtaatcctctctcgcaatctgcgcgatcttttccgagaaccgggcattcacttcgacccccttcctagctttctcgaagtgtgcaggatagccgagcttgttgcttatcgccttctgcgcgggtgtctgcttggaataccgcgcatgcttccgctggagcacttgctcggcgaggaacggatactgctcgaaggaattgatgcagtgcgccagtccattgggaagggaggagtatcttttcctgggtttggcaggctcggcggaagcttcgaaggctcctccggagattggtgctggaggggcggcaagcggggcggtgagcggggaggtgagctcgacgtgaagggcttcggcgcgctcggagagggaggagaggagaactgcgatgtcggacaacgaggcagagccacggatagcgaggtagagggggaaggcgatgcagaggaggagagcaatgaagcgggagatgtagatagaggtgcgcatcgttgtgcttgtggcttcaagatggacgtgattgaagagcgggaaaggcaccacgatacagtaagacaccgtgtaactgaggcaatttagggccaattcgtggcactggatatgtatggcttcaagaaccagcgaattaaagcatatgtcccttagggttagtctcaaaggcgggggtctgcataggcgacttcttccatcatgcacagtaacccgactatttcggctatctttaatactgcaactatcgcgtcctgctcgctatccccttcctggctgaattatagccatgggctgttcgattttgttcctctacgtactcaccgtcctcgccgtcctcctcagcgcccatgcgcacgaggaacaaccacaaaagtgtagcaaactgctgatacgcaaagaatggcggacgttgacgaacagcgagaaagccgagtgggtgggagctgtcaaagtgtgtcctccttcgtaactaacacgtacggtacattgcttataccgagtagtgcctggcaaacatacgacacgaacggctatccttgacgaaggaccagacggtgcttgaggggaagaggagcctatacgacgacttctcttactcacacgcatcagtggagcacagcgcgcataggaatgcctacttcttgccgtggcgtgcgttccgtccctccttatcttccccaggcgcatacttacatgagcgcagatcgctggttcacctacctattcgacacctcactccgccacacttgcgggtacagtgggccaacaccatactgggactggtcgcgcgatcacgcggacctgttcaactcgccagtattcgaggattcaccggagtacgggctaggtggaacgggggactgcgattcctcccccgaggcagactgtaccgtcaccaccggcgcttttgccccgtcgaccggcaacttcaagctttcctggccgatcaaacacccgctgcggaggaatctaacgctcataaccggctggtacccgcatgagctgcctcaaaatcgcaccctcggcccagatttcgtccgtaactcaaccgagcaaaccacgggcgacttttttaggttccagcgcgcaatgacactaatgcacaaccacgtacataatttcgttgggggcgatttggccggagactgcccgaagaccctgccggaggaggattgccagggcatagcagtcagcttcacgcctaatgacccactattttggctgcatcatacgcaacttgaccggttgtggagtgaggtgcgcccccgaacctatgatacctccccgctccgtatttcggctgcagtgcaacgctactgaccagttttacagtggcagcgccatcatccatccaatttcgccgccttttcgggcatgcctctaaccccgcacaatatgactgacccacgctacgaccttgacgcgcacgcagatcataagatgtccttcgacgttcagagtgtgcccgtggcaccaaggaaggtgtttgatacggagggttggccgttgtgttaccggtatacagacgaggagtgacgggtactagactagactaatacaatatcttggagttcagtcacatcagagtcatattcactcgagttgggttccggcccatctggtttctcgttcttggtgaacggaaacgaggaagcgaggtgccttgctcaactagttctacgcacatagttaggtactctcccaaaccccaaagaatagttgtctagttccatacgacgcatattctttatattcccattctatacccactagattattaactcgactcctgaaaccttgtatacatttctggtgtccactccttatgctggttttccatccaatcatgcacctgtctccagtcccggcaggtatgtacggtccctccgcccgtagcaactttatccccattagccaatttcatgttcgtgccgcccgactctagggttgtgtcagcggcgcagagaatgccctgccgtaggtaatggaagcagtgcgccgtatggtccgacccgtcgtccccattaacaagcaccgcgcgtatatggttaaggcaatgcatctggtgccacatcgacacatcaaatgcgaagtgctcctcccctagaaaaacgaaacccttgccgggagggcggattgcgttccattcagccgtggccgtgatgccttccataccgtaatgggaggggtcgtcgtggaaggcggcttggatggtgcggacctttatggggagctcacgaggtcggtcgccggcgaggtaggctgctgtgcgttagtcatgagtgagaggagaatcaggaatatggcgcactgtatccccgcgttccgcgtattaagatgcggagtgagaagaagagggcgcccagattcaggatgaggcatacgctcagcgctgcgagaaggccgaggtaggggccgcttaatcgggtcacggacttagggaacatattgggtgtgcttgtagggtggtgcgtggagggtagcagagggagacgggatttttttcagcatcaggagcgggttaattgtgtctaacacatctatggccgtatccgctctggcttgggtaggtaagtcacgatggtcccgaagacgcaactgtcgagatgctctattcgccagagtgtttcttcaatgaagtgaagactgccagtaagcagagaagtacacgtagtgcagtttggggctccacaaataatcctaccctactccgtactcatcacgagagatagacacggtgatcatccttggggcaaataatgacgacaccctgatttgacttcttgctcgccaggtggctagtcaatgaatctcgaggaatttcgggttatcgcgcccctcttaggaccaaataggtaggtggttgagaagagaagtaagaattgtgggtaatgcttatctccacactactagtccttccagggctgtgcacgccccactctcgcttcggtccgagacatagttactccgcatctatagagcatatcacatcatatgcattacagatttacaattacatgtaaggcctcctactcctctatttttagtagtgatcgtcgaccagatgaggggacgatgtgagtcggcactttgactcggcacctctcttgttctgtttcggatcgcaaacgcataaattctcaagggcataacgagcactgacaacatctcaacgatccaccccttcatctcacacaaccaaagcatccgctcgctgccaaactccaacaatgcatttcaccaccctgctcagcctcgccagcctcggcctgaatatcctccctgtgcagtccgcagcagttcccgccgctgatttggctcgccgcgccggacagccaatcagccgtgtctatcttcctaacacggtcgagaagaggcacacctacggagtggatgaagacgaggcgctcgagaagaggcacacctatggagtggataaggacgaggtcgtctgaatactgttcggcggcagataaccaaagtctcgcatgtaatgaggttttaaaacgtctataacatgttctacaggcgggcaccgcattctcttcacaactttgttacatagcagtatacattatcaacagagtatatcaagcactatcttggctatcttttctgcatgtacatgtattatgtccagtctctctatacattgtaaggcgcgctagagtgccgttgcgttgcgcaattgtacattaagataagagaggggcgcaaagttgcaccttgagaagcgtaaagcgacacacctacggggtggatgaagacgaggcactcgaaaagaggcacacctacggagtggatgaagacgaggcgctcgagaagaggcacacctatggagtggataaggacgaggtcgtctgaatactgttcggcggcagataaccaaagtctcgcatgtaatgaggttttaaaacgtctataacatgttctacaggcgggcaccgcattctcttcacaactttgttacatagcagtatacattatcaacagagtatatcaagcactatcttggctatcttttctgcatgtacatgtattatgtccagtctctctatacattgtaaggcgcgctagagtgccgttgcgttgcgcaattgtacattaagataagagaggggcgcaaagttgcaccttgagaagcgtactacacataataattccaggacaagacagccctccagcctgcatctacaagtactcatccggcatcgggataagtgtctcattgttagccgcacacatagccggatgttcctccggaagagcctccatgtcagccatcttaacgtcggagcactatcattgcatcagcatcagctctactggggcaagccagagctactgacataatgttccacattccccgtcttcggatccctcgcttcgaagtatataactcccatctcgttgacctgggtctggaatggtatcgtgacattcacacacagctgtcccgagggttggatgggcacatcctgcaggatgatgtagggaaagtcatctctcttccttggtactctatgtcgagtatagagggccgtcacaaggtctccaggatggccggagaacgagagaaaactacgggagcggcgggagtatcgttgggggttatgcactatctccccttctgtgtatcagcctacggtactactagaccggagacagaggaacataccgcagaaagggttgtaccaatctatctctgggcgggccttggggtttggaccgcgggtcatccatgggaactggacgtggaagccggcatgcgcggcggatgtgaggttgatgttgatgccgagggcaagcaggaaggtgattgcagcgaggagggagggcatggtggacagaggtcagtgcagcacggtgtagagagcgagggcaagttgaagtgatctcagacggtctcactccttggccgcgatgatctgtttgaccatgcagaaggactgagtttctgatgcatcgtaactttactatctatggcaaaacttaatcggtccaacactgacccaaaccccgatgtggttctctgcttttagataataataaaaatcttagaaatagtgtttttacaaattaagttcgtaatactaattcaatgatatggtcgagatatatatatttttggaagtaccctttatatgtatgtcccatagaaaaggtacaatttgcattggacccgcaagatccaatccccacttcgggcccccggcggggccccggcgggggccccccccnnnnnnnnnnnnnnnnnnnnnnnnnnnnnnnnnnnnnnnnnnnnnnnnnnnnnnnnnnnnnnnnnnnnnnnnnnnnnnnnnnnnnnnnnnnnnnnnnnnnnnnnnnnnnnnnnnnnnnnnnnnnnnnnnnnnnnnnnnnnnnnnnnnnnnnnnnnnnnnnnnnnnnnnnnnnnnnnnnnnnnnnnnnnnnnnnnnnnnnnnnnnnnnnnnnnnnnnnnnnnnnnnnnnnnnnnnnnnnnnnnnnnnnnnnnnnnnnnnnnnnnnnnnnnnnnnnnnnnnnnnnnnnnnnnnnnnnnnnnnnnnnnnnnnnnnnnnnnnnnnnnnnnnnnnnnnnnnnnnnnnnnnnnnnnnnnnnnnnnnnnnnnnnnnnnnnnnnnnnnnnnnnnnnnnnnnnnnnnnnnnnnnnnnnnnnnnnnnnnnnnnnnnnnnnnnnnnnnnnnnnnnnnnnnnnnnnnnnnnnnnnnnnnnnnnnnnnnnnnnnnnnnnnnnnnnnnnnnnnnnnnnnnnnnnnnnnnnnnnnnnnnnnnnnnnnnnnnnnnnnnnnnnnnnnnnnnnnnnnnnnnnnnnnnnnnnnagaggccccgtgggggggcggcgggggggagccccgcccccgcctccttggccagcgatgacgaacgcacaagggtccacttggccatgcggaagggcggagtttctaatgcactgtaactctactatctatgatgtatggcgagcgcggtgagcagtaaggcgtaccaagcgtcgggtcgatccgtccccgccgccttgtttcgccatgcagaagggccaagtttctgtaactctactatcttcggcgaggtgcggtgagaaataaggcgtactaggcttcatgctgtcatactttctgagcggttacctggaatgggtgccatagcctgttttacgttacttgcgtttacctgcggcgtgccctctctctctggctcgctctgctctcgccatgtcctcctctcaaggaaagtccagctcttcccaatatgagcctctttcactacaagatgatggagaaggctccagcgcaacttttgagaagcgctcctccgaggacgaccactctacccccttgttggaagcctcggacaacctccccgccctcgcgccatccaagccctcccagctgcccaagctcatcctctatttctccttcgccctagcgctgctatcagctgtgaatgtcgctctccttcccactacactatcaaagtaccaagcctaccccttctctgactctgacctcgaggccctcccctatggcgacgctaggctgggattggacagggtagcgaaattcattccccctcccaaggtctatcaccacacttggccggatagaattgcacgagtgagccggagattgaagaatgccgtgtggggtcagggggtgcaggtctatgttactgtcgaggtccgtactccgtacttgctccttcctcattctcttcactgacgcaagagaaggactcgacaattatgcgctttcccatctcccccaccggcgtcaacacctgcgcactctcctggcggccacctcccgagttctctccgcgtgccaaagacctcacaaccaagggagatataacagaaattgaagtctggcagcttatcgcaccctcagacatcttggctaacgtctcttccactatggacgagctcgattatgataccttatcgtattcgacccttcccgtgcgcggggagctgctcggcgtacttgaccttacagccaagccgaacagcacaacactggagttcgcctgtccccgcggggcggagagtctagtagtggaaatgaggtgccagcgcgtggcgtgtcatgtgagctttatgcaaattcatatagcaccgagctttgggtttgagttgcttgagagagcataaagtgttcagataaacttcacatttctcaactagctcaacaaaagcaatcaaatagcattcatccgaataagaaattcttttcattccaaaaatcaccatggccgtggttatttttggaagaaatccagctggttgatacagtcagatgtcctcgttggaaaataaccgtccatggtgatttctggatgatcgctggcaaaagggtgcgtgttgcaatggatgagaaggatttcttatttgtgggagatgtaatgactcatgaggatagacatgactctaaagattcttaaactcggaggaatcgacctcgtacttatagaaaggcatcgggtcaatctagaaagcggggtcgttgggtagaatgttcttttactatcgcgatgaagcgtctgccgctttggaattttaccttgataactagtaccacttcgtaccctatctataaaaggtcctataccaagaagttgaagtttcaagaaaattgccggcaaaatgtcccagagttatctcaatccaaatactccggagtccggtagatgcctgaaagagtggggtggggctttgtcatagtaaaagaatgtcacaatatcaacccccagtagcttaccccatactaatcttgcggtagtgtgtggcactataagatgtccccataggcagctcttcggttgctactacgcaaaacccactcggccatattgtgtctaacacccatcgagctgcactcacaacatgtccactcaactcgacgccgcctcaatcgcccgggtctccttacacgaccccgctcacttcagcatccagcactcccaaaccatccaccgcctagtgctcctgcagcattggaacattcccactgactccaaggtgctggaattaggatgcgggcaaggagactgcacgactgtccttgccaatgctgtaggcgagcatggtagagtagtggcggtcgatccggcggatttggattatggtaagtcctctagcttttctgaccctgctgcctgtcctgggtcgactgatagcccccgcaggtgccccatatactctcggccaagcacagggtcacatctcgcaaggcccgctgggtggacggattaattgggtccaacaaacccccctggactacctctcttccctttcctcgccgcccgccagcgaaagtaaggccttcgacgcgacagtgctcgcccactgcctatggtacttcgcctccccatcgcttatcctttccaccttccgtgccatcaagcagcacagcaagcgtctcctccttgctgagtggtcgttagtagcgacacacccctccgcccagcctcacgtgttagctgcgctcacccaggcagcgctggagtgccgtaaacctaacagcgaatcgaacgtccgcacggtactgggcccaacgcggcttaccgagctggccttagctgctggatggcaactggagagcgaggccctcgtgcaaggtggggaagggttgttagacggacaatgggaagtctctgcttgtctttcttcctctttcgaaaaggaagtagaggagctagtggttgatgagagagaacgggccgtggctattgcgtcacgggatgcgtgtgaggcaagcttgaagggcatacaagggggccggaaaggagttagggctatggatgtttgggttgctaatttcgtctgattgggcgagctgagcgtgtccgactcctagacctcttctaagcccgatctcttgatcgagatttgccgtggaagattgcctaaagaatatgtcttgctgcgatatatcagattaggatcctccgaaagttgaaaattaggtgctcccgacttcctaattaaaaatccggtgtatgttggcagtatatttgatagttcatggtactggtattcccgccaagaagaggcttgtagcgtgcatgcactagcgtcccttctcggccgggccggcatggcagggtagaacggaatcgaaacagcaattaaaaacaaccttacatatcagaaccaggttgatactaaaaaatgagggagcagaagcatttgcaatagacctccgacaatccggcagaaaactcgactaatgtatctgaagccacttcttggcagtaataccaagaccatgaattatcgaatatactgccggtatataccggcttcctaattaggagattgacagcacctaattttcaacttccagggtccagcggaccgcaatgttgagacaacactaatgcacgggcggattgcacgcctttattttgccagtcgaaaaattcattattaggaataggcggtctatcaaagcggtcaaaagtggacatgctggggttactaatgccttcgacctcatggggtaattatatagacggcctatggaattacaaaattgtccgacctttagaaagctacacatgcataaatgcttatctttggtcaaattaactgcctcggccgcgcataagcaagtccaggggtcggcatataacccctgctacttcgtccagagattcgaaatttgggatgaacttcggattctggcagatattttgagccagcgataggaattacccttgccccgatgtttctctagataattatagctcccattattcttccttcctagcagaatgcgtgacattctaccatcacgccatcttgctggtcccctttcagtactcattccccgagttaggccagctacggccagtttctataaccgccagtgcgccacgatattttcaatagtaagttttgacctagctcaccggattttcatcatttgctcgttactatacaccattcagtcaggcctcgacacatgagctctttgaatccaattttaacgctacttttgcgagatggcgtccgatgttttgcaaacgctgcagttctggaatatgctctaatacgtgcatgacagctatcgaccaatcccgcgcttatatggcgtcgcttgcgagggtccgtatttttggaaaagaaatttcaaggggccggtcaatgcatgctcgacgtcaaagactcaagggacgctcttgttcgtgtcaatctgacctagacccgctaagtcgcaggctatattccaatctttgaacaaagctgagagaaaaaaacgtattcactatctatcgatgtgattgtaaagtatatgcctgggcgcacgtctcttccgctcggccaaaagaccattatctatagtagtgcaatgcttatatcctaccgtagtgtatgcaggtgcgggttcctgactttccgggtgaccaacctataggggaccaaagaacccatttggtagggtcgatgtgaatctgacctgggagtcgattctcacaagactggatatctttggactcgacctgatctcgagtaagagaacagccccgaatcacctgcgtcatctcgggaggatacacaaccgctgcagggatgtccgcctattcactcggttccaggcgttgataagttgacaaagagcaggaagatccatgcaacgctagccatagcgtcaccgagtaaccacgaggccatttgttgatgttagtctagactttctcggggataagaaagataaaaccgttaggccgtaaaaccgagccccacactacggactctggagtaatggctgcggtatgcgacgctaagaggtgctacttaatataatcagtctcagcagcgaccaaccgcaggctcgtaattctcactctactacagtgccagatcaaacacggcggagaccccggatttcttagagagagaatggcattcccatacaagcatttcttggttatcggcgcgacagctggaatcggcaaggcccttgcgactcgtttaattgagtcgggggctaaggtcaccgccgtgggtcggcggcaggaccgtctggatgaattcgtgcagactttcgggcctacacatgcgaaaggcgagcggttcgacattggagagttggtcaagattccagattttgtcacaaggtacggtctatttcccgaggtccttagccggggctttctacatactaacggggtgatggacaacaaatagggtgatgaaggaatcgccagatattgattccattgtatttaatgctggggtgcaaaacccgtacgatctggcagatctcgacaactttgatctgacggcgtttcaccaggaagtgaagatcaacttttccagcttcgtttctctcacccacgcccttttgccatatcttcagaagaacccgaacccaactagtttcatcttgtaagacgcctacccggccgcaatctgcggcaagagctaatggatgtatcagtaccggctcgaatttggccatcgtgcctgccgccacgcttccggcgtactcagcatcgaaggccgccctgaatgtctttactctctgtttgcgggagcaactgcggcactcgaacaccaaagtgatcgagatttctcctccaccggtccagagtaaggcaaccctggccccataatgttgatatttcagtgctgacctttagctatagcggaattgcacgactacatgggagaggatgcgggtcgccagttgggaatgcccttggacgcattcacgcagcaggtttatcagggactgaccgagggcaaagatcagattgtaattggcagtattgggccagaagacacattcaacgggattgtggacagccgtcgcactgccttcgagaacctctccaagatgatgcgtggtgggaagccctagacaggccgcagatctacggacgatcaagaacgctgcgttcttcgattaacctagagaccagctggaatgaatgctacttatgtttgaaatctctatgccatcaagtctttgtatttaccttcagttcatgtaccctctcttcgccttttagtaaagccttgggacgctcgaggagcgccttgatggcaaccatctgtgggccactgcggtacatggaactactgtagaatgcataccccgtaggccatggtgatcgtgaaataacaaagaatcgagtagccggtccattacagacgcggtctgggaaaactggtgcatcttctcaggggctagttaccaggtaactagttttaccgtaactgagtgactgatcacagcggtagccccaccatttaagccagtattcatagtccaacatccccgcgatttgtatggaatagacggactcaagccaccaggggtcaccaccccaacaaagttgcccctcgcccatatacatatcctgaagtcttccgcacccacccagaaggttctgtgggaaataatgggcaatacaactctggcctcaatccctcagtccaccaaccccgatgtggtcgattgggaaggcctagatgatcccctgaatccgatgaactggcccctgagaaagaaagtcgctatcaccatcaccgtggcactgctcactattttaacgtatgagactgcttcccaggcccccttcgtcggtagttcggaaactaaaacgaagagaaatcctaggccactgggatcatcaattgtagcaccagctgcctcccagatcatggaggaattccagcagccctaggatgatgagttgcgtgcatttgtagtctcggtctacgttcttgggtacgcttttggaccgatgatcctcgcccctctgtctgaattatacggacgcaacataatctatcatgtctgcaatgtactctgcctcctcatgaccatcacgtgtgccctggctcctaaccttctgggcttcatggtgtgtcgtctgctggccggcacggctggcagtgtgccattatccatcggagcaggatcgctcgcggatatgattccctcaaagaaccgcgggttggcaatgggtgctcggtcctgtgcttggacccgtgacagcgcccataggtgcgtatctcctgacgcctggagcatactgacagatacagcgggcggatatttggtagagtctcaaaggcctttgatgcaggcgccaacggttactgtcgaggagaaggggtcggagtagtcgtgctcaaaaccctccctcaagctcttgctgatggaaacgaagtcctgggatgtctatacgacgttcgacgaggtttccgagaagaagctagtgaacgacatcctagtctttcaccctgtcacaggtgaactgtttgccatggtcatgggcgccacctttcatagtgtcgctatgaagtcactcgtcgccatgctggcgaatctcaatacgcctggtgtgagtctggcgaatactcaacctgcgacaaatggaacaaagggggtgaagaacagccaaactttgaattccgtacacaccaatcttcattccacaaataaccgggatagtggtagcattgttggtattgaacagaacctggattggattcttagtgtactacggcaactactcagctcagcgactgagattcctgttaacgagattgcaccaaccacttatctggcaaacattgggatcgacgcgctcatgagtacggaagtcttgagcgatataaggcgacagtttcatgttgatattccgatctccgaattcatcgctcttgacacggttctcgccatctcgaagttcccgcagcatgcatttgagcacactctactcgcatccacgggttccaaattcgccgaatgtcttacccggaaagccgacctactggagatattctttggcagtatcaaatctagagccttgctggaaaacgtctacaccaacgcccctatgttcgccgctggctcagatacgctgtggcgcatataccacccgtactttcatcattcacggcacagaagacgatcttattccctggaaacaggcagtgagaacttttgaagcactgcgacaacgcaacgtcattgcagacctccgcattctcgatggtgcagagcaccttttcgatctctacccaccttacaaagatgatttgcaggcagcaaaagttgtgcaggatggatatgaatctcttcgtaggcacgctggactgtgattagatcttgtgcggatattttggcacccatcatattatacttagaaagagcattacccttgtggatatatgtgttatttgttatgtgaggcgagataaactgtcgagttagtcgtggcactaagcattactgcaactttgtgaggatagggcctaatctgaagtggcaaattgacaaaggaaacaatgaagaaccagcagatgtgacgtaacctagagaaacattgatgtttattatggcgggcagaacccttaggcggtaggaagcaatgagccaatatgataacacaaaacagtccaaaggcggtctaaatactaattgtttaacaaactcgtgcaagcccatttaacttgccataagtgattgtagagcgaagcgaagtacagtaattaagtcatagcctcgtgtgcatgtcatatcaccaggtcttgtcacctataggtcccaaaatcattgaaattatgtcacgtgaagtgttatcggctaactttggcagaataacccaaccggcagaataaatacatcagtccctagagaatgaaccatcattatattccccagagcttctagccttacaccgaattagcttcatgtcgttgatagatcattggaatatttcatacaaacagaatacaaagcttttctacatgttacgagatcaggccgtgtttgcactatttacagtgctgcagcacccccgcagcactgcactaccgaaccaagggtccagtactgcagcgggactagtgctgcggcaccagtgctgtgggatttctcaaggcctaaactgttaactagttagttaaatagactatattcgaaaggatattaagaggataaacacggttggcacagtattaagagctatactagcttcctagttttatgttgggacagagagagaggaggttacaacatacaggacgtattgaggagctgaacccaaataggcaaaactaaccacatacagtagttcacaggtccgccgtttctatgcataattatctggatctattccctttttgttctttagtgctgttaatatcagtgggctgacaacgtagcacgtgagtgatttgaataacttggctagagacaatattgaagttgttatatatgacacatgacggatggccggactggcgggccacttttcttttataattagctcatccgcacacccgaagatgaggccacctcgaggtattcatatttgaagccggtgagagtactgagtactcaggtcaagagtccagtaactatatactatggcaacatctacactagctcaatgaaggataccggtgtgtgccggaagacaagtatgtattacacaaggtggtcaatccatttgcgcactgaatatcgaacttttatgtatactagtcaattctctttggattgcctacctgtcgtatgtccggggtataagcgcccgtataaaaacagccgcagggagacatgatccctgaaaggttagtaggtatgaagtatgaagaactgcatatgtatgtagtatagcgcttggcttagctttcgcaatttagattagagatatcactacatgaagaaatccccgcatatcagagaacaaggcattgtcatacataaatattaatactccgtgaatctatcaaagatgtcaaagtggattgattcatgacgttagtggggaatccagactcaccgcattatgcgcctccttgaattctgtttcttctgtttcttctgttctgtttcttcgggttttttatcttttttttattcttttctttgtgaattcatactataatccattcctacagactatattctccatatcttactcggccagacccccatgttgggttaagttctgcttcttggtccttcggcttcgggtcggaattgcccctaatcttcccgaaattctcgtatttgccattcttcatataacctcaacctcaaaatgttaccaaaaaatgtccagaataaggcattcgttgcaagggtgagtgcaattccgctagatctctgtttttgtctgatatgcacggggtcggtacattgttacgttgccgaggcttgcattatgtgtatgtgggttaggttgattggggattgtttgacctcatatgttacatgaagtataagaaatataagatgcctaaatcgcatcgtccgcgcgatactgcgttactctgatcgcgcgttactgcgtttgggactactatatcttctgtcttgtttaccttctgtctcttctctttctcacaactcccacaatcggacattctttcaatattcatctggcttttcttcgtgaaaggcacaactcagaatgttcgccgttaacttccttccgcagtccgacgactcaaagatatgtgttgtcatggtgggccttccggcccgtggcaagagtctcatcgccggcaagggtaagtgaacctgccatccgtaaatgaatgtgagactaactccgcgactagccatgcgctatctgggttgggtcggtatccctgcccgtgtcttcaacgttggtagctatcgccgcttcagcaacccgcagccaggagccgccttctttgacccccacaatgaagagggtgaacgcatgcgccgagctgccgcagaggctgccatgtcggacatgcttcagtggttcaagaccggcaagggtattgtcgccatcttggatgccaccaactccaccaaggagcgccgcaagtggatctatcagaagtgcactgaagctggcattgaggctctctttgtggagtccatctgtgatgacgaagatctcatcatgactaacatcaaggaagtcaagacgacctccccggactacaagggtcaagatcctgaggtcgctgcccttgatttccgcaaccgcattcgcaactacgagaaggtgtacgaaaccatcgacgaagatgagaagaagtacacctacgtcaagctcatcaacgtgggatcgaccgtcatcatcaaccagatcaaagattacctgtccagccgtctggtctactacatccagaatattcacatcaagcctcgttccatctggctctcccgagtaagtcaaaacaatacagtttccaaccattatgtgaagccttactgacgaaaatagcacggtgaatccgagttcaacctgactggccgtattggaggcgactcgaacatctccgagcgcggcgaagcctacgcccgcgcacttcccgagctgctgcgcaagtctggtgtccctgacaacaccaagatcgtaatctggacttcgactttgcgtcgtactattcagagtgcccgtcacctcaaggctgcgactggctatgagaagctggagtggaaagccctggacgaacttgactcgggcgtttgcgacggcctgacctacgaagaaatcgctgagaaataccccgaggatttcgctgcccgtgatgaagacaagtacaactaccgctaccgtggcggtgagtcctaccgcgacgtcgtcatccgccttgagcccatcatcatggaactggagcgcagtgagaatgtcatcatcgttacccaccaagctgtcctccgctgcatctacgcctacttcatgaacgtgccccaggagcagagtccctggatggaggtgcctttgcacactctcatcaaactcaccccccgcgcttacggcaccgaagagcagcgcttcaaggctgatatccccgctgtctcgacctggcgtggaaagggcacttcggcaaagcaccaggaattccccgctgagggaggaaagaaagaggacactgagaccaagcactaggggagtgttgatctgcatcggcgcggcgtcacctggatgtggggggaattcggattgcatgagatattcagataccacaaacatgcttttcctttcattatgcgttagttagcctactttaactgaacaatattattcttacaaatcactttttaccgcgggttcattgtaatattcacgcgttatcggaaagttgaagttttcgacacttgagcgacgactgagcgacgactgagcgacgactaagcgacgactaagcgacgcctgactctcagttaccgctcacttctaacgcgcgttacattctaatttgtttctatcagagaaaacttgtatgaacaaacgactagagaatagggcccgcgcggccagatctcgggatatagttatgctgactcagaactgactcagctcggacgtcatgcggagagctccagcagcggcgctcctcgaacctccagtggaaggaattgaagacagcacgcccatgttgtcagcattcaccgcgcggccgctcgtggagctcaagccgcgcgacaagtctcgcattgaatcagtcctagcctacggtgaccgcctcctcactggtttgaacaatggcaaccttcgcgtctaccgcgtcactgacgacggcaagaccgagctccttcgagaactagagaaattctcccgatacaagattgaacagcttgccttgattaaggaggctaacgtactagtctctctttctggtggttatgtctggctccacgatgcgcagtcgtaccagcttgttgaacagctaacccaaacgaagggtgcttctgtatttgccatcacgtcgaatgttgtcaatgatcccgatacaaatgtgcctgctattgtttcccgcttggcagtcgctgtcaagcggaaaattctcatgcgggcgtggcgcgacatggaactggagcgggatacggctgagctgagcttggttagtggggtcaagactctcacctgggttgcggctacgcgactagttgttggactaaactcgagctttgtcatggtcaatatcgagaatggacagtccacggacctggctgggccgggcagcattgaggaagcaggccggttcacgggtgttggcgccgcgagcatgagttatattggtatgggaggcatggtgccgcggccacttgtgacgagactgcgtgaaggtcagattcttctggctaaggatatcaacacgagtttcatcgatattgacggccaacctcttggtcggaagcaggtgccttggagccatgccccggtggagcttggatactcgtacccgtttctgttggctttacatgactcatccaaaggtgtgttggaggtacgaaacccggagaccttgtcgctactgcagtccatcccgctgccgtcggctagtattttgcacattccgcagccgaatatcagcctcgcccatgccggtaaagggttcctcgtggcgagtgatcgcacaatatggcgtatggaagccctgagctatgatacccagattgatgctttggttgagggtggttatctagatgaggctatcagcttactcggcatgctggaggatgctctcttacgggataagcctggtcgactgcgcgcgataagacttgaaaaagcgcagagcttgtttgccttgaacaagtaccgggagtctctagatctttttaccgaggtgtctgcacctcccgagagtgtcattcgcctctaccctcgcttgatcgcgggcgatctctctatagtcccggagtctgaaactctgaatggaaagacgaacggatcgagtgatgggtcgggtgatgatgttgctgctgggcagacatcaacacacgcagcctctattatatcatctgtgccaaagcctgatgaaggaagcgaggctagcagtatccgtggagacgacaaaggtacgacaagctccccttttttttgaatatatgctaattaatcataggtcttcgaatcgctgtccgcgagctacaaggatacctagcagatgttcgccgacgcttccagcgcttcctcaaccccgacggatctctcaaagctgctataccagtcgaagccacagatgaggcaagtgactcggttcttaagttactagatttcccatctcccgatgagtttgcctcacgaatttgtgccaaggcacggttggttgacaccactttgttccgtgcacacatgttcgcgacgccatcactagctggatccctcttccgcattgccaacttctgcgatccagaagtagtcatggagagactcgagggcactggcagatataacgacctaattgatttcctttacggcaagaaattgcatcgccaagcactcgaattacttcagcgctttggacagacaaataacggacctctgagcggcccgacacgcacagtcgcgtatcttcaaaacctacctccggatcaaattggcctggtactcgagttcggagaatggccacttcgtgccaaccgcaagttgggaatggagatattcctgaccgacactgaaaatgctgagacattgcctcgtccacgggtcctcgcattccttgaaaacatagacaccgcgcttgccattcaatacctcgagcatgtcattgatgaatggaacgacatgacgccggacatacaccagcggctgctcatcttatacttagatcaaattacatccaacgagcaaggggaatggaaggagaagttcttgacgatgttgaaagagagcgagcaatactcgccagcgaagatgttagatcggctcgatcgagagggtacattgcgcgctactcctgtgaaacaagccatcactgacatatcccagatgccaacttctacgaagcccgagctattttgtttagcaagatgggtcagcaccgacaggcgcttgagatctacgtcttcaaacttgcggaccacgagaaagcggaagagtgagtgatatgtgacttcaccaagagcaacaattgctaacaccagaaagatactgcaaccaggtccatctcgccgaaaaggccgaagaagagaattccatctatctcaccctcctttccctctatctcaccccaccccacggctatgagccccaaaacgaccccgcgattgaactgctagccaaacacggctcacgcctcccagccgacgccgcattgaaactcatcccggacaaacaggccgtggagaaacttgaattctatttcaagggccgcatgcgcgccgcaaactcaattttcaatgaagcgcgcatcgtggcaaacctgcgcaaggcacgggatatgcagatccaagcccagctcgctctcggtgagggaattcgtggtggaggcacgcgggctcgccacgtcactgtcaccgaggagcgaatttgcggcgtctgccataagcgtttgggtgggagtgtgatcaatgttttccccgagtaagtcgttttcagtcatttgcttttggtttgttcgtcgctgacttgttttccagtgatacggtggttcacttggggtgtgccaatcgaagacccagtgttcgagttgggtagtatgtttgctctctgcatctgcattcgcgaggtcggtgttgtgctcgttcttgttcatggtcgtcatgtcatgtccgttattttatttttattttttgttctccagatcaagcttctctgttcatttggtttgtttggtcgatggagactatcccagcgactttgatacccatagcatctgcccatttcaagatacatccggtcatgcaaatcatgcatcgtcctcaacaacctcctctccgtaattttcctcctcctgagcttcctgtgctgagatctggccctgcactttgtcctcttccatgcgctccgtaaggaagacgttgatctgctcctgcagcttgggcacgagcgactgcagcgctgagaggtgggcttgcttagccgctaatgtgccggttgtggttgatatcacatgctcaaaggtctcagtggcatgaggggcggtgtagactgcagtcaagctcgtgttggaggccatttgaaatttaacagggaagttggggaaattgttggccctggagggggagatggcagagaataatgtcccaagctatcctaccgcctttcttaccgccttttcgctgatctaagcccgacctcgggacttggcactgcttccccagggtctcagggtcccagtccttcaggtacggctgaatacgaagttatgtattactcgaggtacttcgtggaccatacggtagcattgccgaggctaatatctgttgggttctgttcaggcagtaatccctagtctgtatccggcctggatgcatactagtaagaaatttgtggaaattggaaaaaggaatacaagtgcaagggatgacatcaagcagttaactggtctacaaatataaatcgcaaggctataaactccgttgaatctagatcaaagcttagccaagtctccgcatctttcgtcgatctgagattctgccagataaaggtagaggaagggatcggcgactgcccagatgtggcttttgtaacgttgtaaacaaaaaacttcgctgaaagataacctgcctgaaagagacaaagacagagagagcatgggatattcattatgaatcctaccttccgatccccgaactcgcctgggcgtcaagtacctcctgcccctcgctacccccgacctccatctgatgacgaagaggaagacgactccgatgaggacgaattggttcaccccggatcctccggtagtgacgcttcttccaatgtgacaaccgtttccgccgctcctctcacgccgatcaatactcaacagtccgggggttacttccccccacaaccacgatcggccacttcacctcatcaccctatgccaaacccaacagctcgacggccctccggcccgggggccccccccccgcnnnnnnnnnnnnnnnnnnnnnnnnnnnnnnnnnnnnnnnnnnnnnnnnnnnnnnnnnnnnnnnnnnnnnnnnnnnnnnnnnnnnnnnnnnnnnnnnnnnnnnnnnnnnnnnnnnnnnnnnnnnnnnnnnnnnnnnnnnnnnnnnnnnnnnnccctccgtcgggctaccccggcaccgatcacggcaccactcacaggggttcttcgagccttccctgccgaccgcctcctccgaccagctccctaccgtgtcagcatcccgtatcgccgcccaggcagcaatgcagcagacaaaaaggcaacaaaatgtgatgcccccgatagaggatggttctcgtcccaggcgcagtggaagcggctcgcctcctctcatacccgctccgttgcgtgtcaaccaaccctccccgcaaccccctccgccactagggaatgtggccacggcagctgcgaatgtggtcttcccgcgagccggtgctgcgccggtagaaccacagcccgagaaacagaagaagaagaaactcttctcaaaaccaaaacatatcggaatcagcagtcataaagatgtgagcaaagaccgtggtcttccctctccgagcaagatcagcgggttatcgcgcatggtcagcggctcggctacgaatttgaccgacctgtcctcgaacaactcgatgtataatctatccaatgcctccgtgaacactgtggtccccgcagatcgtccgccgcttccagagaaggaaaaggataaagacaagcataagcatcatttcctatcgaggcagaaactcaaactaaaagatcgcgtcgaagaccacttcaacctccctctatcatcggcttcgagtaattcccgtccggcagacccaaatgccccacaatctttatattcctttactcctgcgtctccagctcctggtgcgacatttggcaagtcggtcagtgggttagatctcctgcatggtggtcgagcgctgcgtgagaagaaaaaggaggaaaaggcgctcgccgagtcggagcagatggaatggctggccaataatactggcggtcctacgccacctggcggcttcccaggtccgtcttcagttggtagttcggggacattccctgagtctattcttcgggagaccttgcaagggtttgggttgaataatatgaccccagaggatgcgtgggacttccttaaggcgaagctgctggtcatcttcgatggcgaagacgtgcgcattgccattgaagatctcaacaagctagtgctcgttcatttgcagcgttgcgtggttaagagggctcctgcgtctattgtaacggacttgcaagaactcttgcagactggatttgcgactttgaatcacagttcgctgattggcctcccagatgaaaggttgatcccgcatctggtccaggtgtggctgctggtgtttggcacaattctgccattcattcaggctgtgtttcttcccttggatctcgagttcaagggctgtggacccttgatgactagccgagaagccggtgaattctggggtgcactgcctttcggcggaacactcgatgtgcgaagtctggtcctgattgccttccgtgactgcatgatcctgaatcgctacgatgcccttaaagcaaccttctcccggctcagcctggactccatcaacaccggattcccgacactcagcgtcacaactaagagtaccggcactggaggccgccctggtactgcagcctcgctcgatgccggcttcggtagttacaactcgcagtcatccacgcttctcagcaccgtcgacagttactcctccgacggcattagcgccatgaccagccacccacgtccaacgagcagtgactctcgcagtcgcgccgcctcaaacacatcttccaacgcagatcccctcttcttccagtccatcgcatcacctccaacctctaacaaacggcctaccatcatccaccgcggccccactgactcctcccacgtcatcacagagaccgtcggccgcatgctgcaatgcatcagcgtccttgccagtgtgcaaacgggcgacgctgcccaggagcggatcgagattctgagcaaatctctcaaacacaactggcttggtcgcggccgcacaggccgtgatcgtcgtggctttgtcggtgccaagatccggcctgtaatggtcggcggtcctcctgttattgatgatggagattccctcacgacggctggcattagcatcggtgcgagtactagtacagggggatcccggggccgaggtgactcgtcctcctcagaatggagttccaatgtcccagggcccgccatgagtgtgcgtggtggtgttagacgagaattgagtgttctatagctttgtgtgttttcttctagctactcgttacgattgtatgtatgacggcgggtgggtaccttttggcaaggggcgtttctgttttataaaggaattgatatcctcgggcattgcccagcaatttcatctacgaatcatatactaagcatatgccaaccggcaagtaccgccccggaggatgatagtaagatacaagaagggccattgggccctacctttatgataggagatgcagaggccaataagatcggagaatcgatcctctactacgtagtcgacctagatataaactacgatactattctactctgtagggaattgtgtgaatcgtacaatttttcttttttttttggttttttttttggggttttttttttgggttttttttttttttttgaatccaacagtactccgacaagtcagttgtcgatacgtacccagggctcggccaactagccactgggtaacattcacaattcaacagaggggatggcgtctcaccacgccatcccctcaaacaatcaagagagagggcttactcccgagccctcccctttcccttgacatcgaccttaccagcctccttgaggtcctggtaacggtaccggcaggcagtggagagaaccttccagccaatctgctccgaaacatgctgagcgatgagcacaaagtgcccatcattcagcagctgcgagccaaattgctgcaaggcctccagaatagccgcctattgaatagaatagttaacaaccagatcaactgagattgaggtcagagaaagggtaaagtgaatacttacgtcgaaaccaggccagggaccaagcttatccacgatccgtccccagcgcctggtcactgcccgccatgtcatctcgtcctcccattcaaatcgattcgcgttccacgcctccgcgacctcgctccaccttaccgcaggattcccctgcttcatctgggacatcatcttgtcccctttcgatgcttcctcccatgacgccggcggcttgttgccccgccttcttcgtttggaggcgggttgctgggcgccggagggttgagggggcccgggaactgctgtttcggtctgagagttagtactagaatgaggattggatgatcctgatgcatacgaaagctttgacttattcgcgggacggcgacttgtcgaagccgacgtggaaggaccagactcagtcttggtcttagtctcagtcttgttcctaatcgaagtgcggcgtgttgcggtcgacgcaggtgggggcatctcaatctcaggcttgaccgtggccttgagcgaggcgtggcgtgttttgatagacgcaggctggggggtctcggtatcaatctcggcagtcgtcttcggcgaggcgctgggttgctgtaccgaagcggaggttcgggctgagacggaggttgagggcaccggagtcgagctcttctttttggttgcacggcgtcgggcacgctttgcgggtctgtttgatgttggggatgcttcctccactgacggcaatgtctcttcagcagatttagcacgtttttcagacttaggtgtatcagcttgagatgggccaggcagatcgcgggccttgtcagccagctcgcggtccatggcagcccatttgaggtccatcgcagctcgttcgcggtccatgtcagctagctcgcgctcattggcatcccaagccgacatggcctccatggcagcccgttcgcgggtcatgaaaggcggattgagggccatggcagcccgttggcgggttatttcaggcagatgatcgcgggtcatgtcagccatatcgcgggccgtagcagctcgttggcggtccatgccagccagaacgcggtccatgtcagccagagtcaggtctacggcgggcagatcgggggccatggcagcccgttggcgggtcgcttcaggcagatcgcgggccatttcagccagagagaggtccatgtcagccataatgcggtccagggcagctcgttcgcgggctatgtcagctggttcgtggtcaatggtagcaccaggcagatcgcgggccatgccagctagctcgcgctcattggcatcccaagccgccatggcctccatggcatcccgttcgcgggccatgttgcggtccatggtagcccgttcgcgggccatgttgcggtccctggcagcctgttcgcgggccatgtcagccagctcgcggtcaatggcagacccaggcagatcgcggtccatggcaatctgttcgcgggccatgtcaaccagatcgcggtcaatggcagcccgatcgcggtcactggtagcccgatctgtagtgtgtaagaaatcgaagtctaggtttgcagtggcagacttcagatcagcaaagagactgtcagtatcctgattgttcagcttttccagctcttcttgtatgcgctcttgttggaggtgctcattgtccaggatgtcttggtagatttcattcttatcctttttccatctgggatctccaccagcatctaagttcaggagctcctgctcatccgcgagaacgcgttcgtactgttcagtagataagatgcccatggggtcagtggtccagctgttatcgggagtcctttgggggtaagtgtagtgggacgggagcacatttggatcttcgaataggccatcatatgctggtggacgttcgaatctgtcaactccatattctactggacggtaaggctgataatcattcaagtaaggatcaaagaatggagccatggggtcatccatgtcaatggaaggatccaagtaaggatttgcatcgtcccggggtggcgagggcacgaaatcgaggtagccagtgtagtaggaaggatcctcatagttggtaggaggcaatggtgaatcggggatatcatccaaagtaagctcgatgccagtgggatcgatgccagtaggatcgatgccagtcgactcatgagatgtgccctcatcaccagattcaggaagatccatgatggactcaaggatgaaaggtaatgtggtaagtaggtttcagctgatcaaagtcaatattggatgcttggtttggtttgatagaggatgaaagataatcactgttgatggagttggatggaacagtcgagtgagtggggtccaagatggactaacgaggactgtgattgaaggtgcctcgacagaaagagaggcaagactcaggtcctgagagtgtccttgtacaatgtcagagtcttgggaagcaaaagaagaagtggagtgttgcaaaggacaagaaggaatggggtgttggaaagcacaagaagaagtggactcttgggagtcctcacgaggtctgttgttttgaaaatgaatcttactttagaagtggcagtgggagtcgcgtcctgaacgcgttggcagaatctcacgagagatatcgcgagaagacacaactgtcctcagtgatgaacttgggaggtctcttgatatgaagcagatagagagaagtgttctccttcgaattggacaggagcaaggttgatcaagtgcagattgagaatgttaacagagtcagagttggtgcgaggagaaagatgagtggtgcgaaagagacaatgtaaacaattagacgagggggctaatcgacgtattaagcacaacctcgacgtattaagtgcaaacagcaggactctgtttgagtgattgggccacctgaggtgtctgattcaatcgatggtgtgcctcttgtttcctagccaactagaccactagcacaggggaaagatatcttctagttctgtccattgtgtcaatcttaagagagatgaggtcgtctcgaagttcagcaccagagaactattcatgccatcaggagcattcgatgtaaatgatcaaccaatggtcactttcctaattaggcttatagaggctctgatcagccctatagcttctagcttccctagaagttactacagttactttactagtaagctgtctagcaagtctccgtgtctatcgccgtgtcgaaggtgttggtagttgaagaacagggtaaacattgaatttatattccccgtcaacctcttagtgtgacgtccaagtagcctacctcgacatgctcgatctttatatatatctcgactttatagtggatacactataccatattgacctatcatatttgatacttcgatttgattggatcactttgctctgaagatcggattgatattcataccttgctaatactaagaccattaacttagtgctttagggtgacacagggatattcaccaagtcagtgatgcctttgtctagagccatgcaataatgtctcccatagctctaggactattctacttctgagtcatatctagtaatgacccccattatacagctgttcagccttggcgcttaatatcaacagcggattcgccagggtttagggctaaagaaaaagtaaaacagattgcaagacagttaggcctccaaactgggcagttgaataataagtacaccgtatattgacaagaatagaccgacagaaattcgtggggccgactgattggcttcagggctgcaggctgcacagcctgcgcatcgtgatgcgtcgtgatgcgtcgtgatgcgttcctttcacataaaatgcgtctcacccacagcgccattctctttcttctctgcatttttgtctttctcttttcttcttcgtttttccgtatttttgctatttaatccatctattttccctttatattgtccaacttgggttaaatctccaactctccaactctctatctccaactccccggcttacggcccacagctcacagcttccagcttccagcctaccggactgggctgtcatggatacatcttctaccccagctgaggccaaagatgaagttgttccatcagagaacgtgaacggctctgcccagtctacagaaaccaaagaagtcaaagacgctgctgccgcccccgcacccgagacagcccctgcgtccacccccaaagtgtgcaaaaataaaaaacacaaaaagaagaataagcaaaaggaagagagtgacagctcctctgagtcttcttcttcgtctgaatccgacagcgatgccgattctgaatccgactccactgagagcgacgccgataccgagaagcgcaagcggcatcgactacgaaaggcgcgtgcgcgacgtgcgaccaaggataagaaacgtcgcaagaagaagaagcaacaacggtcgcgcaaggctgaggcatcggattcggaatctgactcttcctcggaggcagactcggagtcttctacggactccgatgatgagatagatgacaaggcgttgcgaaaattggtcgccaagctcaagcttagcaaaaagcgagctaagaagctgcgggaactggcttctgaagagttagccgcgagcgattctgtgggcgaagctcgccgcgagaagcggtctaagaagaagaagcccgcttccaaggtggcctacaagcgtgtagatcaatgtgagtttctcttcttctttcttcgtcttgcttgtctctcatgcttggaattttcgttgctgacttgttacagtatgggacaacaccatttaccagtacaagctcactgaaactgtggatgaccccgatgccgacgagtgggaccagtatattttcaacatccgtcgcaagttcaactgggagaacaagtatctcgagactgtcgtcgatatcaaaagcaaaccccttcgcgatgccctttccaagatcatggatggtgtcaagggcgtcagtcttgtgcaggagcccgccgtcgtcgatcccaacatgttgttcctgtatctggaagaaacaaggcagtacatgaagagcttgaagaagcagtcgcgcagcgagaagaagaagaaaaccagaaaagctgccgccgtcaaagctgcgcatctgaaggttctcgtcaaatacctcgacaccgactacgcagacatcaagaagaccctatacccactgctcgaggccaacacgatcaccttcgatctgctgtgggccctgtacaagcccaacaccatcgcttacaccccgacctacggcagcacagatgagccacgtgctttcaaaatcgagtacgctgtcaaagagtcctctttcgtgaagggtcagtggtacagtgtcgatggtcgttacctcgagtacgacggcaaggactacggcttcggcactatgtccgctgaagtcgacgccttcaaaggcgcccgcaagatcaccagtctcagctgctatccactgaagtaccaccgcgacgctgaggctctgcgtgcccgtctcgtcgaacgcggcaaacgcttcgtctccctccgtggcatgaactaccgcttccacaaaggcatggccttctacaagaaaaagcgctctctcatcatcaaggtcaatatcaatggccgtgtcatgatcgacccggctatccaccgtcgcatcaaccctaactataccatctccactgtccgtcccaaagatccggatctaatagatcctaaagaacttggagtcagcgacgacgagggtgattatagcgacggctgctgctgtggcggatcagactcggactctgagcatggcggtaactctgatgctccacggatgatgtacaaggtcgttgaggataaagatggatgtgcacgtgtcgttgaggtcgaagtcgacgagaacggcactgaggtccagaaggagaagatggaccgcattgaaggtgccacagataccaaggagcgcgagttcaccgaagaggagcttcttattgcctctcctgtggttctgggcttcgccttcagcgagaagctctggcttgaattcaccatctccggtatcagcgatatcgggtgggataaggaagccttcggctcgcttgtcctcccgtcgaaccaaaaatccatcgtcaaggccctcgtcgagtcgcatgccttccacgccgcgcagaacatcgacgacgtcatccagggcaagggcaagggtctcgttgccgtgctgcatggtccgcccggcacgggtaagaccctgacggcagagggcatcgccgagctactccgtcgcccgctgtatatggtcagcgccggcgaactgggtactgacccgcggacgcttgaggcggagctgaacaagatcctggatatcgcgcactcctggggcgcggtgctcctcctcgacgaggcagatgttttcctcgagaagcgcacgatccacgatatccaccgcaatgcccttgtcagcatcttcctccgtctgctagagtacttccagggcattctgttcttgaccaccaaccgcgtcgagacctttgacgatgccttccagtcgcgcatccatgtcgccttgcgctatggcgatctaactgtcaaggcgaagaggagtatctggaagatgttcatagagcgggtccgcgctatcgatggcgtgcatattgcttctttctccgaagaggactacgacatgctttccaggcacacgctgaatgggcgacaggtatgttttactgttctatttcttctctctatacaaatacaaactaaccaaactattccatcagattaaaaactccgtccgcaccgcacaagccctggccgtcaacgagcaagcgcctctgtccatggatcatatcaagagtgtgctcgaagtggccgagacattcgatcaagacctgcgcggcggaacgggatacctagacgccatgcggagctatacttgatttgatttgattatttccgaatatcttgggcaatttggatgcttactatgaatatcgttgcggatctagtattcagctcgctggttgcttttgcttttgttgcttttcgtatctgcttgctggtttcggttcatctcgggtacagagtattcaggtacgacgtcgcttcttctggcatggacatggggcgaatgagtttaggtagcttgaatacaacatcggtcaaaaatgggtttcggtacaagtcgggatcgtaggatacaccgatctatagattataatggattatcaatctagtgaagaacgttgtcatacactttcattattacaaaaacaaaagtcacgacgggacatggctagtggtacatggaatttttcaagggttagccttgacgaagtcaacacccttcttgatgttcttcttcaagtcaaccagggaggcatcgaggagaccctgctcgtactcgttgaccttgccaacggggaggatctgctcaacaccgttggggccgagctcaacgcgggaagcgaagaagtcaacaccctggtccttgtacagaggggagtcgacgaaggtgggctcgatgacacccttctcgccctgagcggcgcggaggagagactcggcgaagcgggcaccggccatggccatggagagggtggcggaaccggcaccgtccttagcctggacaacctcgtcaccaccgaactggatgcgcttgacaagggcgtcgcggacctcgccggagatggaggggtggctagactgcgaaagcagggggacgatggtcacaccggagtggccaccaacgacggtgacggcctcattggcggggttggtcttctcaacctgggagatgaagcgcgaagaacggacgacatcaagggtggtgataccgaacagacgcttggggtcgtagacgttgcgggccttgtagacctcggcaacgatggggacggtggagttgaccttgtgaatgacgcgtggttagtggggcctcgaattgtggagcgataattgcgacttacggggttggcgatgacaaggaccagggccttgggggcggcctcagcggcggccttggcgaggtcgcggacaatggaggcgttggtgttgaagagatcatcacgggtcatgccgggcttgcggggaacaccagcggggatgaggatgatctcggatccctcgaggcagtccttgagaccggtaccctcgggcttgtagccggtaacagtgctgttggtgttgatgtggctcaaatcagcagcgacacctaaataaagtcagtaattgcttttgctgaacgaattggatcattcataccgggagcaccgcggatatcgtagagagcgagctgggaaacacgggggttgagcttcagcagcagcgagagaggctggccaataccaccggcagcgccgagaacggcgaccttggaggcctgcgcgaagagttaggtttaattctggggaagacagatgaatagaaacgcacattgaaagcggaggccgagaaggcacgcttctggaagaggttgacagtacgacgagcagcaaacatgatggatgattgagggatgtggatgtgagaagggaagaagttgagggaaggaggagattccggtgaaagagatgggattggcttggctccacaacaggttccgagctcccgatggctcggctgagctctgcttctcttacttcgactaatctgctattttgggatttcctaacagcaattgtgacgttctggggtttattattggctagctgggcttaaaatctctctaggatcaaaataatacctcatttccatgctaaaaggcttatgtcccattctcggagcaatggatgtcagctctgcatgtggtaatcgcatcatcctgtcaagcgaggtaattaatttcgtgtgcttaacgtaggaagaattgtttccaatcgatatatttagcttagagatatatatccagtgagtcttaaggagctacaatgccttagaaccctagagaagagactagcctatagttagttgtatagttatgcaattgaaggtccaggtgtccacgggtgagtggtatactgtcacgacgtcataggcccagaagttcccgttcgacccaatgcggaagtacactgaaataatcaataccttgtgtactagaaggaatataatggattactttactaaatagcaagtcctataggtataatcgcatactcggaaatagctggtgatggtccatagtgaagttgaacctagcgcaacctactccgtagcatatatatacattacaacccacactccgaaacataactaacacttgtcggcaacaaggacctcaattacaaagaccaaacgccggcgctaatgaacccaataagcccaatacaagatacaagatcatgtcctacccaggtaaaccccgagaaccttcgccagctcccaactatacccagacagagaccaagactacatagtgatataaccctaccgcaagaagtgtagcactgcccagcagaacaaaaagaaaattaccacaccaccccagaaaatccacttatcctggcgcgcccgccgctccaccatccggatcgtatcgccgctaacaccaagcgtgttcgcaacgctgtatagtcgccgctgagttcccttgagtacttcgcgctgctgtcctagatcagcgaggaccgctcttccgcggtctaggaaatcatcgagttgattgtgtgtgttggagaagaaggactgctcgcgtagcgcgtgggtttcgcggtcgtagtcggcggggccagcgccaaagccgagaccggatgatgagggtgcgaaggctgaggtgctctgcgggagtgaagattgcgcataagggttctctggtgttgcggcgtggtgtggacgacggcctagaagttcattgtggttggtgaccgattgctggtatgaggtcagtattggagtatctcatgacaggattgatgtatacatactgcatcttcgcgttctttgcggagtcgatcgaattgtacccgatagtccgcgagctcacttcggaagttcttgacgcggtcgaacgccttttgttgtttctccggaattagttccttcttggagagtgcggagtagtcatcgacggtgcgggaaagcgatgccaaggaagcagcaagctggcctagaagctagaagtcaatatcttaggttgcgaagagtcggtggtaggagcgcaccttgtagcgcgggtgaggaggtggttggcgactgtgaaaatgtatccagatcacggcggatcgacgatgattgctttaaagcagagttgaatagcgagttctgttcatgttagctgtgtaaacctatcgcgaggaactgcaatatacataccatgttgtcaatgcgccgtatagattagacttttagattgcttcaatacccagtaagtcgtggaaagaggagtattaggactgctagtaagctaattaagagatgataagctcccgagctcaaacaccaaggtcatcatctgatcccaccggaggccagatggtcttgtttgggcccattctgacgtggttcaccgccttcaggtacaatacattgggatatttttagatgcataaaccaggcgatctttgaatcacaacgtacttgattgaggaagatgtcgccaagttatgattgggtttaatgacttgaccggcacctaagggggagattgcgttttatctcctttattcccaaattcgaggatttctatcagctaagttgttgaggtttaaattgaagaagtcttgcaaaggtcaccataacgcctcgttttagatttccaagcagggggataacaagtcccaactgtagagaaatagaaacaaatttggcaaaaagaatcgggtagagatcgctggctcgagcctataccttctccgcaatatcttccatatcgttttcagtgagaacaaaatcagcctccctgccctttttatcgcgaagaaagatgtcgtggaatggtagcgttaactgtcccatgactccaggagagtttggccctgggttccgttcaatctcactcttttgtgcgctgctgagaaccgaaggtccatgctgctaccaggcagtaggtttgttgcccacggttcgacagtaattcggcctcgactaagaatgtgaattgtaatcgcggtcttaatttgaccgttagagtctttgaaccaaaattcgatggctgaggctttaacacgtttgagagcacgcgactttgccgacaaatgttggctacttggcggatcttccagctggcggaaagtatggcgtccaggtaatatctgctctcctagttattgccccactgcggacaattcttgtattggaaggcattaagggttttatctcttaacacctccagctactgtggcacactgtgccatagtatccattatctagttatggatcacatggtcgattagtcatcctacactggaatcccccaccactaggtagactctgcgagtagctcaacttcgaatatctacacgtcgtacttgctaggaagacactacattttgtcatattctacaactgctagaacttgaaaggaaaatgatatcgttgttaaggtactggtacagtcaatccgatccgactcctttcgccaaatgagaatgcaagaccacagaagagctgggatggtatatcaagataaaagcaattaggcaacaccaaaaagacgaacgccatacatctatttgggagggaacttgttctgcaagaaccatctagaccatagattagcatcatgccacacccatcagtccgaaaatatatgctgtacttacttgctgacgaagtagtccacggtaccaaagattccaacagcaccggcagagagaccaaccagctcccaggagaggttgccgcgcgcgtgttgcttgtaggcaccgaagccgaggcctgcaccgaccagggttgcgatagcggcattggcaatgaagacagggttgctggtgtttccacagaggctactgctcttcaccttgtgggtcttggccttcttcttttcctcgtcctcgcgcttcttctcatcggcttcccgctctatccgctccgcctgggtggtggtttgaacatcttgctcaaggaagtcggactccacagtctgcacatgggggctatcaacgtcgatcaacgaagctgtgctctcggattcatcgtggtagactccgcccaccgggggagcacggctggagtatatgttagttttgtgcatggagaattgatatcgtgaataacttacgcctgttatttgttagcactgtaatttttgaagtttttgaatttagatatgagtttgaatacttacatcttcgggggactgcttggggcccttggcggctgcgtcggcgtaagacatgatgttgttcgtgatggtaggtaatggttctgtggaaattctagtcaacaactaaaacacctcaaggtctagaacgaaaatgtaaacttactggaaaacgtgatatgggaagggaggagtccgagggggaaaggaaggatttatacccaggaagctggggggtgatgacatcacgtcattgacctgggcccactaccaaggttccgtgggctgttgatctcataatagctatacactagtagtactagcagtacacaaatgaacctgaagataatttacgtccactcttctaatgaaggcttaattcaaataataactcgattagatattacggtcattagaatcttgacttgacctcggaaggcgttatcaggcacaacaacttcaccaaaacacaaagatgatgcagaagaagtcgagaaaaatttcattgggagaatttaaagctgctaaagagatcaaagacaaatgggacctatgtaatggtctaatgagggaggcaaggtgttttaatacagattacatataagtcagaacaagagagcttcgctgtctacagaagaagctccagagggttctcgacgaccttcttcagctccttgatccattcaccaccaacggcgccgtcaaccaccttgtggtcgaagctaccggtcacgacgatctggtcgtcccactcggtaacggtgccctcctcggtctcgacggggatagcgaccttgcgggtggtgccaacagccaggataccggcctgtggggggttgatgactgcggtgaagcgctcgacagcggggttcatgcccatgttggagatggtgaaagtgccgccctggtactcctcgggcttgagcttgttatcgcgggcacgcttgccaagatccttgatctgcttggagatgctggagagtccgagaccctgaacgttcttgacaacgggggtaatcaaaccagagggggtagacacagcgacgctgatgtcaacggtgttgtgctgacggatgatggcctggccgttctcctcgcgccagctggagttaacctgcgggaccttcagaagggcagcagcgcatgccttgaccaagaagtcgttgacagaaagcttgtactgaccctcagcggaagcgttcagagcctggcgaagcttcaggagcttagtaacggagagagtggtggagacgaagtagtgagggttctcggccacggactgcttcagacggttggcaatggtcttgcgcatcgagctgacggggatatcctcgaaggaggcctcgctggaagcactagtggtgctgggcttggccttctcaacatcctccttggtgatgacaccaccacgaccggtacccttaaggcccttgatggatatgcccttctcgagggccaaggccttagcggcagggctgagagagggctcacgatcaatgctgggctggagcttctcatctgaagtctcgggctctagtgcggcgggtgcctcctgagctggggacggggctgagggctcagcgctcttgggctgctccttgtgctgctcaccgagatcaggcttgtcaccaccggcatcggctgtggtaaaagactcgaaggcggagatgtcggcaccctcctcaacaaggacggcaataggctatagggaagacaagttagattgatgaaacgaccctcagagaaactgggtaatttcttaccgagccaacagcgacatccttctcgccgctctccttcaggaccttggctaggataccctcatcctggaactcaaaatccatctgtgccttgtctgtttcaatctctaccaggacatcaccgggctggagggcatctccggccttcttctgccacacgccgatgtttccagcggtcattgttggcgaaagtgccggcatggtgatgattgtgtggggagggaaagctatagacagacatattagaattggtgtgttggagaaagagataagtcaattgtcatacacttggaggcatagaagcgggaaaggccagagagcgcaggcacttgggtcctggtggaaacatcattagtatcaacccacaatcataattattaattagtggaacataccgaatcgcctcctggagcttggaggagacctggggccggcgcatagcaacggcacctctggacatgaacatggcgcccggggtgcgcatccgaatagctgacgcaaccatggtgcctgagacttgttgcgattataaaaagaaaggattaaaggcccttgacgctgatatgaagaaattgaaagagcccggtacagagaaacgtgaagggccaagaatggatgaggttggggtagaaggagatgcctctaaatcacgaacttttctgttgagctacctatggctcccggtgagaggagcggcagcggcctcttccgatatagtcacgtgctgtaatttacagtctcaagctctggctatgtacataatattctgccagcaatatagctctacgccagttataattgattataaacaagcggtaaacccctctcagaaggcggtataaacaagggtcaacacttttgcttagtcaccgtattggttatccacggattgtttttttgggggccaatgcctttcctaccgcattaggtatacacctatgttgtaagaagaatgttggaaaacattcaaaagcatgtgagatcgaggaattaccaagctggaggtagttcttgtgatagttatcatttttactagcaatatagatgtactatcgtacagggtacatgcctatgtagtacagtacttagttacatacatatagtgtttaccccgtactccgtacagaaccagacgatcaacattctgccaggcaaaaaaggccggtgaggacctttggaatctccggctccagccaatccttagatgaggtaagcatgcattagtcccgattcggagaagacacgcagcccccgtccttacatggtcatcgcaattgtttcaagcttcgccacgtttactcgttcgatgtttttgatctaattagatcactccgcccggagtcaccctgactatggcggacaccgaagtcggctcagagccgacccaatccattgcaatgcctgagaaatccgtcgagacccccgacacatcttctacagtaccaaactccgacgagccaacactgcccgagcagaccgaatcggaagaaccaaaccaggagagcgacgagggagtagccgaggtccaggaagatgaagaaaaatcagaggtcccgtctaagcacgagcctgaacaaactgaacaagaaccgcaaacagacggtccgcctacgatccaggaacccccccacgaggacaacactgcgacagaaagcagatggcgatcggattcgcggtcaacaacggctacgtttatgacgcagcgatctagcccagtcagctcgacggtctttattgtgacggctctggacaatatcgctgcttcgcgggacgcccggagggacaaaaagctggaggatgccacacaggtggctctggccaatatcagacaacctgatgggcaagccattgatccggagcttatcttccgtcctctacacctggcaagcaaagccctgagcattcctctacaagtgactgcattggactgcattggaaagctgatcacatactcctatttcgcgtttccatctgccgcgacagacaacaatgccacgcgcgaacaacctcctcttattgagcgtgctattgatgcgatctgcgaatgcttcgagaatgaagcaacggccgttgagatccaacagcagatcatcaaatcgctattggcagcggtcttgaacgacaagatcgtggtgcatggagctggtctcctgaaagccgtccgccaaatctataacatctttatctactccaaatccagtcaaaaccagcagatcgctcaggggtcgctcacacaaatggtcagcacggtctttgatcgcgtgcggacacggatggatcttaaagagctccgagtgcgagagctagaaaatccatcctcgacccttgatacatcggcgagtgacgtgggccaaaactcggagacggctgatcagcccgtcattaaagagcccactgctgagaagctcaccctacagagttttgagtcgcctaacgaggttaccactgtcaacgataatgcgccgactacagtcacgcgtgctaagcggtcaacgacgaggtcaatgtcgggtatccccgaggaaaaagatgatgatagctcggccgaggacgatgtggacgagatttacgtcaaggatgcttttttggtcttccgagcgctctgcaaattgagccacaaggttctgactcacgagcagcaacaagatgtcaaatcccagaacatgaggtcgaagctactttcactgcacttgattcactacctcatcaacaaccacaccgcaacctttctatcccctctggcagcaatcaagaacagctcatccagcgtggatggaatgaatctcctgctagctgtacgacctcatttgtgtctaagtttaagtcgcaatggttctagcgctgtgcctcatgtcttcaaagtctgttgtgaaatcttctggctgatgttgaaggacatgagagtcatgatgaaaaaggaactcgaggtgttcttgaaagaaatttatctcgccattctcgagaagcgcggggctcctacgttccaaaagcagtacttcatggagattctggcgaggctaggtggtgatccacgggctctggttgaaatctatctcaactacgactgtgacagaaccgctttggagaatatattccaaaagtatgctctactcaattcttgattttctttggcatggactaaccttcttagtatcattgagcaattgtcccggtactcaagcgtgccggttgtaacaacaccttcacagcagcatcagtaccaagaacaacacactaaaatgtcagccattggttctgaatggcaccatcgaggaaatcttcctccttccttgacaagtgcacacattgcccctactccgccgtcctcgatgcctcatattccaccggagtacggattgaaacagcagggtttggagtgtcttgtggagatactgcgctcactggacaactgggccacacatcgcatcgatgaactgcccgaggcagccattccctctaaatcgatagataactcccgtgagtccttggacacaagcgtgcttgtttcaccgcatctggagtccttcgagagtgggactggccggtccacacctatgcccgaagacgacccaaaccagattgaaaaagtcaagcaacgaaaaatcgctctcacaaatgccgtccaacaatttaatttcaagcccaagcgtggcatcaaggccttcctgaaagaaggtttcatcaaatccgagtctcccgaagaaattgccagcttcctacttcgcacagaccgtattgacaaggccatgctgggagagtatcttggtgagggagaccagcaaaacattgctatcatgcatgcttttgttgatttgatggaattcacgaagcgacgcttcgttgaatccctgcgctcgtttttgcagcatttccgcctccctggtgaagcccaaaagatcgatcggtttatgctgaagtttgccgaacggtatacaactcaaaaccccaatgccttcgctaacgctgacactgcatatgtgcttgcgtactcggtgattctcctcaacacagatcaacacagttcgaaaatgaagggccgccgtatgaccaaggaggactttatcaagaacaaccgcgggatcaatgacaaccaggatctaccggccgaatatcttgggaccatttatgaggagattggaagtaatgaaatcgtgctatacaccgagcaggaacatgccgccaacttcaaccctccacccccggctcccactggccttgcaaccagggctggacaggtgtttgcgactgttggacgagacatccagggtgagaaatacgcacaggcttctgaggaaatggcgaacaagacagaacagctctatcgttcccttattcgagcccagcgcaagacagcagttaaagatgcgctttcgcacttcattcccgcgacatcagatcgtcatgtcgggtcaatgttcaacgtcacatggatgtctttcctatctggtctgtctgcaccgatgcaagacacgtccaacctggaaaccatccggctctgcatggagggacttaaactgtccatccggattagctgtgccttcgacctagagactcctcgcgtggcctttgtgactgccttggcgaagttcactaacctcggaaacgtgagggagatgatggccaaaaatgtggaggcactgagagctttgctcgacatcgccttcaccgagggcaaccacctccagggctcgtggagggatgttttgacatgtgtcagtcaacttgatcggctccaactcttgagtgatggagtcgatgaggggtcgctgcctgatgtttcaagggcaccttcagcactttctaggacgccttcatcagcagatacctcccgcagatctacgcaaagtacacgacgccctcgccctcgctctgtgaatgggccaaccgctttccgcccagaaattgccatggagagccgttcggcagatatgattcgtggcgtggaccgtatctttaccaacactgctaatctgtcgcatgaggcaattattgacttcgttcgggccttgagcgaggtcagctggcaagaaatccaatcttccggtcacaccgattcgccccgaacctacagtctgcagaagctcgtcgagatcagctactacaacatgactcgggtcaggattgagtggtctaagatttgggatgttttgggccagcactttaatcaagttggctgccactctaataccatggttgtcttctttgccttggattcgctccggcaactttcgatgcgcttcttggagattgaggagttgcctggtttcaagttccaaaaggacttccttaagccttttgagcatgtgatggcaaacagcaccactgctgctgttaaggatatgattctgcggtgtctgatccagatgatccaggcccgtggcgacaatattcgttcgggatggaagactatgtttggtgtctttacggtcgcagcacgggaaccctatggtaagcctcgctgctcaaattaatccgtccctcgctaatgtatcaaacagagggaatcgtgaacatggcttttgaccatgtcacccaagtatacaataccagatttggcgtagtaatcacccaaggtgcctttgcagatctcatcgtatgcctgactgaattctcaaagaactccaagttccaaaagaaatcactgcaggcaattgagaccctcaggtctaccgtcaccaaaatgctacggactccagaatgtcccttgtcacaccgtggtgcttcggcggccatcttccaggacaatggaaccaatcttgctaaacaacttacccgtcaatcacaagaggagcagttctggtatccgattctcatcgcattccaggatgtactcatgacgggggatgatctcgaggtccgctcacgggcactcacatacctctttgatacgctaatccgtcatggtggcgatttccccagggacttttgggatgtcctttggagacagctcctctacccgatctttgttgtcctgcagtctaagtccgaaatgtccaaggttccgaaccacgaggatctttcagtctggctgtccacgacaatgatccaggcgctacggaacatgatcactttgttcacgcactatttcgatgcactggagtacatgctgagccgcttcttggaactgctgatattatgcatttgtcaagaaaatgacacgattgcacgaattggcagcaattgcctgcaacagctgattttgcagaatgttgcaaagttcaagccggagcactggtcccagattgttggggcattcgtggagcttttcagcaaaacgaccgcctacgaacttttcacggctgctgcatcgatatctaagccgacagaggcagttaatggggacctcacccaatctccagatgctgctgtagcaacaaaagagatgcctgatgcattgcagcctaacggatcccaaagcgcatcttctctccatgatcctcctgtccaaagtgaagcccgcgccgaattggaagactatcgccctcactcagaccagcagcaacctgcggctgtcactgcagctcggcgccgttacttcaaccgcatcatcacgaactgcgttctccagctgctcatgattgaaacggtccacgaacttttctcgaacgaaaatgtctatgcacagattcccagtggagagctcctgcggctcatggggctgctgaaaaagagttatcagttcgcgaagaagttcaacgaggataaggacttgcgaatgcaactctggcgccagggattcatgaagcaacctcctaatctattgaagcaggagagcggtagtgcctctacctacgtgcatatcctcttccgaatgtatcacgacgagcgagaggaaagacagagcagtcgcgcagagaccgaggctgcactcattccgtaagttcattatctaatattctctccttgttcattgctaatttcactagactctgcgcggatattattcgcagtttcgttcgccttgaagaggacacccagcaccgcaacatcgtcgcttggcgtccggttgtggtcgatgtcattgatggatatactaacttcccgcaagatgactttaataagcatattgaggccttttaccctctcggagttgagcttctgagccgtgatctcaatccggagattcgcgttgccctccagtctctactgcgccggaccggcgaggtccgactaggcattgctccgcccaatcccctagacgtccccatcagcccgcgcagctccgtctcccagaaagcctcgcgccgcgatagccaggtctgacttactgcatgatttttttggatatcctcgccgcgggcttgattttcggcgttctataacccgactcttcggggtcttgtgttgtcacacgagcattttgttctactttagatgcatacctgctgctgtattgataagataaaatatttcttgacttgttttcttatttattctgtacttcctctagagttgggatcttacccggctcgtaaaaggataatacaccgtccatgtccttttcagtcatccctacaagctcatcaaggctccatgtttcgcagactccagacatcctataattattagctcacacttctttttgaagaggattgcaactcaccatttcattctcttagggccttggtcaggattcggcgcaatctcacggagcttcctccgtagctttcccacattctcaatggctgcgcccgtgttcgccggcaatgtctccgcgatcttcttgcgcacaatactggctaatttgggcccgttgccatttgtgctgaccatgatctgcaatggcccatcgcggtgaatactcccaaaatagaaatcgcattcgggcgggacatcagcgatattggcggcaattcgcctctccttgcaaagtttccagacttgtgtcgaagcctctgggtcgtcaatggcacagagcaccatgtccacattatcgaggtcggatggctcaaaatttcgatcaacgtgtgtgacttgcttttctgccaccctgaaagccacttcttcatttagtccagcggctggacaaaccacagtgactcgggcatcggcattgagaacgttgagaatgcgccctgcagcaacctagcggagatatgtagatcagtcctcatcctttaaacgatagatacttgctatcatgtttgaccacgtacctctccacctcctacgactagtacatgcttgtttttaatttgccaagcgagtatcaatgaaccaccaccttgcacttctgggaactttgacatggtgggatgtgggaataatgatgcaactgtcccgtttatcggctccgataaagaaaaaccgcgtacggtgggcggtacacaccatccccgcattattcccgagcttttcccttctgaacttttttcttctttttttttttcatcctcctttcacgtcactcgtgtctttttcttaaattatgcggggcgtccagatattttcggggaattctcacccccgtctcgcagagactatctgcgagcgcttaggcactgtgcccgccaaagctaacctaggaaaatttgccaatggcgagaccagtgtcgagatcggtacctcagttcggaaccaggatgtttacatcattcaaagtggcagcgagaagattaacgatagtgttatggagctcctgattatgatctcagcgtgcaagggtggctcagcgaagtccattacaggtatgttgccgacgcctccagatacaaaagcttaccccactaactcgtttctctagcggtcatgccgtatgctgcccgtcctgtttgattccaatcacagacaatgctgactctcaaatgagatatttcccatactcgcgccaatctaagaagaagagtcatcgtggtgctatcacggcccgcatgctcgccaatctcctcacgatcgccggcgtggaccatgtgatcaccatggacctgcacgtatgtttctatgcgatgttgagttttgtaatatggatattgatgggctcctaggcatcccagatgcaaggattcttcggaaagccagtcgacaacctctttgccgaacccttcattgcccgctggctccgcatgaatgttccctcctggaaagacgctgtggtggttagcaagaatgctggcggaaccaagcgagtcacatcgctggctgatactctgaagctcaacttcggtatcgtgacgacagatcgtcgacgcacgaaggtccccgtggccactatgactgacagcacagtcttcttcgatgccgtggatgatgatcccatctcgagcaaggacgtacagcctttcgagcttcatatgcaaggttctaacagagcacctgccacacctcccattccggaagagccggagccaatcactcctcctcctgtgccatattttctgcgcccggaaaccccacctgcggctcgccgtctatcggagctggaagcagcatacgagtacacggacgtccgtgtgcgggatgttatcaccggtcgtctggtgcagggccatttggttgatgatgattatcgtatcagcgaagaattacagtctggcggcaccacaccgggagctggcagcagtaccaatgacaacttagaggctattcctgatgctatggttaactccataatctccaacatctcgtcgcagcctcctgatcatgccctcggtggctcctttgacgcagttgagtctgacgacgaagctagtgtctgcgagggccaggtcgatgaaaggaccatcacgctggtgggtgaggtgcgcgaccgagctgtcttccttgtcgatgacatgattgacaagagcggatcgtggatcgcggctgcagagaccgtcgtcaagcgcggtggagccaacaaggtttactgtattgccacccacggtctgttcggggagaactccttagatcagatggaagcttgtcgctcaatcgaccacattgtcgtgaccaacacgttcccgatctcaccgttgatgttgcggagatcaaaaaagttgattgttattgatgtctcgagtctattggcagagagcatccggagacaccattatggcgaaaggtttgttttcaccgaccctggtgtcgtgtgaccatccactaacaactagcagcgtctcggctctcttccaccttaacgactgatgaggcatatggcagtaacgaggaaaaataacgaaaccaagcaaagagagacctagatactttctctagggcgtcgtctttgcgtactgatatgcaggttcccctgcaaccgttgatgacatgatacctatttcctatcaaatgaacgacccgttctgaacctctcccccttcctcgttcccggactgtcctccccgttgccccctaccgttcccgacctcgtaatgtgatcatatcacacccctcaaaccagcgatgcagtccactctgggttctgcaggagcatctcgttttccacaaggtgttcttaacggagcgttggcagattaaaccggatcttgttttcttacttcatgttgtgtgctcttcggagtctacagcatggagaagtcacccctttctcagttcttcggaacgattgacctcgcggttgtggaagtggtgcaagaggcgatctcgaacataatgtaattcgatagcaaacaattcacacatttttcacattgggtcattggacacgttgacattttcaaaacttcccggttgagacggtagacctctggcagtgccgaggatttgctttccagcgattcttcccgattttcttgtcatgttgacttcatttccgtcgcaccgatgcggttggccgtgattctggaagccggttggtgattcggtcgtggtctggtgatcgccgagcccagagggtgtccactacgggagtgtcggtatctacggatggtacacggctttcaataagggattgtcggtgtgcacgtttccattgatcgaccgtgggacagttggatagagcttagttctcactttccaggcattccaggccacttggcgtgatcgattagtccagggtcgattctcatctcccgagcagatcttgaacggtcatggctggcctaatttgcaatctcaggtgtgacagatggacctaagatcactcaagcattccttgcaaacccatcggaagtgcagcctttgtctgttgagaccctgcccatgtccctttgtatagttgagtacccctttaagttggtagttgcagagaggactcgaccctagaaacctaccgttgtgtcaccccaattgggctcctctcggtcgttttggtattctgtgctcatttcatgctcttgtacacttgtacaatgagaaaaagaactggaactgccccatctagtcgctggagaagatcttggctagactgtggtagaattccccaaacaaatatgtggactcacggatgtgacagagatcacaatcctatacgagagactcaacaattccattttcttttctttgtttttttaattttaattttaattttcttccagggctttgcggctattcgataagcaattgggctaaggcaggcgccaaaccggcacactaatgccgccggggggtatatccctgtcacttgatgtgatcagctcgaaggcaaatggtcgaattggatggaatcgttctgaaactgagattgaaactgaagctaaaattgaaataccaatgacaagagggaaatccatgtggatctctgttaagcgaagttgatgtatcaacagttgaagattaggactttcagggggggatctcaaggataataaggtagatatgtcaaaagggcatagtaaatacaataggaagagataataggagatcataggaagatcatactctatgatgtggattatagccaaataaccatctatgtatgctaatgtgccctaatgtactccgtatatacgctaactagaatatgcattctcgatcggaaccggattgctgggatgcaaagatccgatcgaagagaagaaaaaagaaaaaccactagacttgccaattaaccaacatagaaacctccgttgtcagttcaatccagctcgtcgggacagaacatatctcgggtctatacaattcagctccacttcggatcatagtcggagtggacgacgatactagtcatctctatcatatttattgacttccaattaggttaattcccctttattctatattctgaaaacgccacactagtcccaactcttaaaaataattcaaactaacaagtcagtcgggtctcttccgtccccccagctttctcggaatcaccctttgcatcacgattcttccaatcatgtctccccgatccctccccatctggaggatcgaaggctgcatctatttgctaaactaggatctacctcgcttcgcctaagtttctatgtaagagattccaatatatctatccatttgtatccatttggatttctctctcatatactccgtaaataaacacccttctgtctgcttatttctttacccattctattaaatttgctttttctttcctttttttctgaggaactcaattgatcccggttacatgcgtcatcggctttgtgcgtatttcggctctttagttgtcgactggttgcatctgggatcctctcaccgtgatctctggacagaagtatataatgattgatttgtcctggatttcgagtctcatcttcttcatcccttgacccatcgacctcctcttccccgctgaactctgtcggaactctgctaagcccattctcctcttactatattccattggtgttcaatccaagtgcctggaacctttctccgctttttcagtgatcgacgcagttcccagtcccccgggttgtgcttagtctgtgagtcgcagattttgacaagcaaaagggaaccacaagctaactatgacagcttctccaagtctatatcaacatggccaaccaatgttccggccacgtctttgccattgtccaggctaccaatggcaacatcttgacctggcgctgttccgactgcaattctggaccatttgtggctatttggcgttgcaaaatctgtggtcattgccgctgcaatgcttgtcacaccaataagggataggcggaatctacggtaagatccttgttacaaattctatgatttgacattcttagctccttgcaagaggcttacttccttaaagagacgtctgcatttcccttctagcatttacaggactgatctgccattgatctcccactctgcatgaaccctgtgcaagggtagttttaccaccataatccctggtgttgggttttgattcaatccactttcttcgtggctcggttggcgtgtgtttatgcattttgatgtgttccaaaaagtccccaaaagtttttgatgcactgcatcttgcatccacaggagttatacttagagcttttctcttctttttttttcttttgtttctctgttttctcttcttctggccaatttgtattctacttggattttgatttcctcagggaaagtgtgacattattttatggattttatatcatgtcgtttatactacaattatgcaacctaacacggctactctaacacctcgatggggagtgtgttgggccagtcataggatgtactttatagcacctcgtgatccctgtctatctgaatgtagggtcctggtatccccatcgtactataaaaagcagagttcagggtttcgctttcggtttcgcacctgtggaaataaaagaaatagccaatagtgtttaccataaaaatattacactaaaaagtactagggataagtacaaaagtaccctgatattcattgccccgaaaaaagagtccattgctattcgaaggaatatttttccagccattcaagagctaatgagatgtatctcttttttggcggaattacggttcagtgaatccgcgcaaaagcaaagatactatggagtagataggaacaaataggaacaaatagagtcaaaatagagagaccaagggttcccagggaggtgggacaactctattacttctccacccgcgacgggccttttgggagatttgcatttacaaaagtactgcttagggcttctatagggttgggtgtgggatgtactgaatatgtactccgtactcttcttttattgcaaagatggatataattcgcattatctttaacaatgagaacagatcgatatatgtgaaaatgaatgcagatctcctccttcggcggactcaggtgtagatactctgtcgaacaattagcaaccacgcaatcataagaataagaacaaccaatcaaacctacctctgtaatctgattgacagccaacccaggctctgccatttcagcgtcgcgcaggaactccaacggcaaccaaacaagatgacccttgatgagatccagcttctcccgcacatccttggccggcatatacggatcgaacagatgtccctccttgtgcgtgccccgaggccggaaattgtcgtagtcctcgaaagtcttgatatgatcatcagggtccgcccggaacaacatccgatacgcctcggtgttcccggtcgcttgcgacgtccaggtgttccagaccgcatcgccgagcggatcgatcacgaactcgttctccgggccctcatcgatccggttgagtgacacatcgggaggttgcgcgttcgggtcgcccgaggcgtcgaattcttgtgccggcagtaggcctaggtgctcgcgccacagttgtcggcggagcgtggcggccaatcgggaggcctggtatggctgtccgttcatgcggctgtcgatgaggtcttggtcttccattacgatggccagttcgctgtcgtgcgagccaagctgggactgtggggagtggatattagctgatgatacagaccgggaaataaaaggaatggaatgcgtcagatgtgagagggatgcggtgctggtgtgtgtaacctacccggtcgttgatgttggcgctgccgcagatgatcgtacgatcgtcgacgatacacaccttgccgtgcacgtacagctcctcctggacgaagttcgccttttcggcctctgggtcgccctcccagacctcgttggacatcttacccccgttcaacatgctgcaatgcgatactgaatccttgctgtggaatccaccgtcgatctttccctcggcctttctcttctcgaccgtatcttggaaattctggagcttgcgcagggtttccttcttggcattttggtcggctgcgtagtccttctcgttctcgtcgccgtctttgcccaccgctgggtgtacactttcactcatgatggtctctgcgataccgcgttggatatcctggtatgtgacaccggcttgcttctcgagatcttcgaggtcaggcgttttgttgattcgatcataagcacgcagcgcgaacacgaagacgtgttctgaatgagctggttagacatgcaaccgaaaccgaacagaacagaacacttacctcttgggtcaataccctctttctcgatctgcccaaagatcgagtgctcgccgcgacaaatcgacttgtactggtagtccatgatcgcccgagtacccaacgcagcattgtcacgcaaatcaccagcgaatccaggaatcgcagggatgacaatgatcacgcggaacttgcgaccctctttgcctgcgcgcacgcaagcctcgacgatcgcacggccgatcgtgttgaagatcggacgctgttggtcgccagtggcagtgactatgaaggttagcaaagcacactgctagaagagaatgcagacatactgaagaactggttctcaatatacacatagtgctgggcattgcggatggtctcgcagtacgcgttttgaatactgtgctcgttcagaatcccgctgctccagtcgtcactgctgcgcacgatttgagcgcgcacagtgcccacgttaccacgaggcttggacgacaggggcgtcagcgggtgctggacgtattgtccgcaggggtacttgggtcgctgcacggcgatgatatcttcttcttcgcctacgagaccctccatgagtagccaatcgacatcgtggctgcgcttgtatttgtcgcgcttgatgaagttccaacgcagaacaaagtgttcggcaatgtcgtacacacagtcgccctgcaagcccatggccacgtcgtgccagggcatgcgaccaaagtcgactttgctgacttcgttgctctgccagtcttctacgctctggaagtccatgatccggttgttgttgaagtcctgtcctgggaaaatgtcgccccacaagcctgttgggtggacatcggccaatgggtgctggtttgcgtcccatcgtccgaagcatagatcaatgcctccgataaaggccacattgtaatcaatgacaaggaatttctcgtggtgcgccttgattattgttaattatgtcccaatcagtacatgtgacgcacatacccagtaaagagtcatatcagctgcgttctcaaagacattgtggtcggggtggcgcataactcggatattgccgtagccaggagctccctcggggcagaggctccgcaaggcatgtttagtgtgtgcggaattacatgtcagggcttggttaacctatagacaatcagtatatttctttttcttgattggaggaaaataccaacctctttgtagacaatgatataaatcttgacacctgcttcggcgcgtcgcttcaagatctgatccaatcgccattcctggtgctcgacagggggacggcgcaagaagagttccggagagagccaccagtcggcaatgtagatagtctcggtggctttctccagagcttcggagactgcccacatgtaatccttagcatcgacataccacttgatgcgattcccgtcgtggacgggtgcaaaagactggaagcggtgtgactctgcgatctcagcgcgcttgcgatctgtcgcttgttcgtgctcctcgtcatgacgatgattcgggtttatgatattaaaaaacttgccgactttggccttaaaatgtgtagcctcggctttgacctcgtggatatgggtgtcttaagacaaatcaggtcagtttttcttatgttataaaatgtcaatctgccgacctttgagagacccctccagatgatcaattccttgtcccaacttgtccttgaatctttgcatcattgaggcctttagtggagaaaatagttagaagagggggagggggggaagatctggagataatactggttccttaattcgtgacatcacagccctactgggtaaacatgcattgatctgatttgtctccctaccaatgccaagggaaatacagcaacgccgatcgaaatcctccacctgtgctattcttgttattgcctatttagggttgggccgcgtggtggtgtttccgcggttcctaatatcggaccactcgcttctttcttggcaaagtgtggccttagaaattggttgaattagttatgtacaacatataacaggaacaaaatgactaactacaaacagcagagatctctgactagttagttatagagtcgatcgtatagaatgtttagcggtgtatttggtggagatatatccacgatactacgtggcagcatccataagaaaaaagaaacaaagtgactagtgaattttggagataataaaagacaataaacatggaaattccttgattctgcttctcactagtctacctaggtacagtctgacaaccagtattatggctataaaagtgagaaaaaaaaaatataaatataatgtcacctaaaggctaagggagcattttaagagacatcgtagttacataagggcaatgcctctaatattatcccaagccaactacataatattaatatttactccgtaactatagttagttatagaggcgtgcggtgtacggagttaagtaactagtaggttgacccaggttggaaccaatgacgtaattggatctaaactggagccctagagttcctattcgcgccatactgtacacccactttgagattgtttatttgtattagaggtgagagggagaaaggccctacagatgctgtccaagctattattgttctagtcttctacctaggctataagtcattgttgacatggttcacgtgatatgaaccgccttggagctcaatttcaaaacaaccacatttaggactatagattatctacaacatgaaatatatttgtgatagtatcttcccccgtttccaataaaccataagtctatgttagaacgtgaatcattgctcagctcattgttcagatgttattgtttggcgggaatgctgaccgccaccacgtgactggatgggaaaaacaacgttgtcagaggaacgggccattttctgtttatcctctctcgactcacacaacgcggccagcctttcagagccccaggctcgcgattagtcgacatttttggttaatgtgctagcatcggtttggatcgtatattttgtttgccgggtgcacctacctatttttggatttataaacgttgcgaaacgagacacacgactagccatcgccctggttaccggctcctccacttactaacgcaaaggaagcaagcagatcatgatgccgccagaattaggtaagtgcaatgcaagactaaaaaaactctgctgcaggtcatttggttccccatactaacgtgtttccaagcccgagctcactcgcagggcagtgtggtgtcccagacaacacagattgccaaccaaagccggccaggtacggcagaccctgtgcgagcacgctccgaggccctctcacgggctagccgtcgtcctcggtctagaggatcaacagcgagtatccactcaagtaccacccagcaaacccaagaccagcacctcgacgggttcccgcagttcatgccatcgcaagtcggatcaggccagcatatgttcaacaatccggaggacatgctaatacggtttgggcaccagctttcacatcataacggtgcaccgctggatcaatcgatgcaagacacccacgccgggatgtctcgagccgaagactttccaaatcactcgatgcagggccacccgctttcccatcaccctatacagcccgaacttgcaaacggtttgcccaatgtacccgttccccaataccagccgatgtatgatagtggtgttgagaaccacctccctgatcacatcgtcgaggatcaagaaatctcggagccaggggctaaaaaaaaaagaggtgcgagctcgacagtagctaatgacaacgagctgcgaaagctgcttcgtcagtatgagggatggagtctcaaacaaatggcggctgaagtcatgaagaatgagggtggagggggcaaggctgagaaagtgaagcaggtcttcgcgatgatctggtaaggcacattgccgcaaattaactgcaacatttgtctaacagtatacacaggctgagagaaaattgccggaagagcagtggctccgtacgtcgtgaccgggtctattgctgctatgcagagaactgtggaacggaacgcgtctcagtactaaaccctgcatcattcggaaagttggttcgcatcatcttcccgaatgtacagacccggcgtcttggggtccgaggcgagtccaagtatcactacgtcgatttgtcggtcattgaggaaaagcaacaaaagcttgcgcctcttaacccacagattgcccatcatgcaaacggccctgcttctttgccctccagagctgccagtgcgatgcgctcgagaaggtgagatataactgacatcaatctttatttgctctcactgacaaatgactagtgctagcgtacaacaaccgactgccgatactgccgtgttcccatctcccacaacttccttcgctcctcgattcccgaataattcatcttctgccgactgcaattgccaaggccacacgccatctgggccagatgccacaatcacccgcgataatgtagcccagcaggctgggaaaatgatacatcagatgcttcagttcccgatggatgagaacaccgtcgttgataacgatacccttcaacttcccgatatccgtgcatacttacctgcaaacaccgacttgaaagttgctgcagctcttgctgccctgtatcgctcccattgcatttcggtcatcgacagctttcggtattgcaaggaacgaaatcttatgaaatatttctccgctttccatggaacattgactgttcccgttcaaaagttattgacccatcctaaccttgctccatggatcaaggaatgcgattggatgatgtaccagaagatgattgcgtttgtggcacccctcacaacccaggtggtccctaagccagtcctagacgcttttaactccatctcacaacggctttgcgggcacatcgctgaaacctttaagacccaaccaacccatgtctccttagcacgcttgattcccgcgcatatcttctgcaatctcctcaagcatatgcttgatgtgaaccaggctgccaatgccgctgctgcctggctttgccacccggataaccgaaaccaaatgtggacggactttaagactatggtaaatcctagagatatgatgaccaaggcaaacatcccaacgtgtgcggagctagcgacggagcaaattctcaagcatgacgttcgtgcgctcttgactccattgaatgatgccgacccctcggcaagcttgcttttcttcacgcaaccagatagccccgattctgttgaggcgcacaagttccctgtagaaagtgctccgggagacgagtacaacttccccgacaaatgggttcagttcatcctcaacatccccgctgccttttccaaccaccgcacacagtgtgtcattgaaaaagttgatgccttgtgggatagcgtgttgcaccggcttaccctggccggagcaccaagttttagcgcgtggtggatgacaaaagtcttcttccacgagatgatggtctggcaagcagagaagggtgggttcatgtgcaacactcctggatcactgcaaagtgcgacgtttggccctgaaccactcggccattttcagatgagacaagcgtctgttcccgaggcatccccttttgagaacgattcaaaacctcacccaagtcctcctatggctcacagtggtcatcaaagccagcctcccagtcagcactcggatttcaaacaccctcccagcgagaagcgactctctcttcaagagggcttccaaggacataacaatgacgacagcgcaattgaccttgaggatgatactatgctgctagcagttggtaaatacggtgatatgatggtctccgatcccgcagatgccgaaggcgatgtcgtcgtcgtctagtaatttttgatttctgttcatgagttggagttggatatcccttgattctagaggcttctctattggttgtggatggcgtttccacgattttcctttgttccttttttcatctcctttgtttgcatgaagcgacgagacatgagcaatgaggctctccagtcttccttgcaagccggcacgccggatgctttctttgatcaacctacagcatttaattggcgtggcggaaaccaggaccaacttggttcttgcttctcctattcctgtttgtttactttcgggtctcatgttgggtccctctgtacatattacttgtggacgtaccttgatcatggtgcagtactctaatgtgcatgaataactgttgacacactttccgtatgacctttaacttgattccatatcttctgacttggcaagacataattgggaagatatcctcagattgataatgccattggctcctaagtccgctgttgttctttaaccttctttgcccaaccaaagaactagcttttatgaacccatgtgagactagttatcaatgacattcatagctgtattctagagaacggcacagaatctagagagcagtacaaaatcagagaacaacaggtctctggacatgcatagaaacctcgaagtcctctctctgtacagtctatacttttcaccatctacgtatagcattcatacattttataccatcgatacaagaaacaaacattcaaagagcaatgacgccaacaacaccaaagacaaagatagacattgttaacacgtcatgaaatcagagtgtagtagtaatcgaaaaaaaataaaaaacttcgctccttccggttgttcaatcccaagacgttcgtttggctttaactacgtagtcacactacgtagtgagtgagtgcacttcgaccggggaatttacaattgaagtaggtattttagagtaaataaatgcttcgcctgggttccggggaatattgttcgtttagagttgtagtgtagtgtagcgatcatgacattttggtcgtgaaagtatatatccgaaaacggagtacaacgtacgtagttacatgtagttgagcataagcgtagggtttagtgtgaggttcgcagtagatagttaccccactgctatacattaggtacattgtagatcaattgctttatgcgccccggacttcatcgtggagggagtcattgacgatgtatccgcacctttctgcaatatagctctattttcactgctttaagatctcaattttgatttcgtgctctgctcactatttacagtttagctacgtaggcagataacctcgaacgatcttgtagaatgctggaattggagtcaatagaagcttaaatcaattctttttaaacgtgcagccgctagcccagatcaggttagggtttattagtttagatatcgaaaagatcaaagaagcaagggtgatatttgcaggaagatagcaaaaaaaatttgacatatgatcaagtacagttgttcgcgtagataagatggatatataaacaagtacatgaagaagaatcgcttctactccggacgacaaataagtcgggggctcacgagacaggctgtgagattgactgccggaccaaatgaccaacacgaggcttcacgatggacccggcgaagctgtgctcggctcgcccccgactcccaggctcgggactaccaatactggctgacggcagtgtcgtaaacgcagagtgcccatcccaagcagacacttggtagatgaggcatgcaagtattaagatagatgaaatgtaaatcaagattcgcgcccaagtcggttcatgagaatgcttaggttttgtcttccttgggctcctctttgggctcttctttaggaggctcttctttcgcctcgtctttggcttttggggagaatctccatcggtcccagttctccagcacccaccagttggtgacgtaggctgcatggtagagccagttcatgatttcttcatcctcatactcgtcctggaccgcggacgcgagatcggcaaggctgaagcgctcgatcgggctcagctcgttcgggtccttggacacatcagtgaagcgccattccacgtcgttgactagcggaatcactaggcggaactcgggacgggcggccgaccgaacagagagccatgaaccaccagtgttcatgactgtgaagtgccaggcttcgcgtccgtcctgcttgacgacctgcggtcggatcatggattgaccttcgtacagcgagcgaatgtcgcgtgcggcacgcgtgctgtcctggctgagggatgccgactcgatcaacaagtcgatgatggtggggacgatctgggtgctgatgactggggtgtcgatctggacgggaggaaggagcgggtgtgcaatcacgatcggcaccttgaagctgccgacgtgggggttgtcatagggagtgataccgccgtcgttggggagggaaaggccgtgatcgccagccatgacgaacaaggtctcattagcgactcccttctcctcctggatatcgatgagctccgagagccaatcatcgacataaccgacggagttcaggtatcgattcatatcgccgttcgcaccggatttggcgcccatcatatcttcaaaggcgtcgttcggaattccccaaggatgatgggtggtactcgtgaggtgggtgaggaagagacgctggtggtcacgttccgcatcatcaatagcatcacggatgtactctcgaagctcagtttccggatagccatagtagttcacctcggcacttttaaccgggaaatgcttggcatcgggcttgatgatcgtctcttttgtctgtttatcgcggaatcccaagtgcggagtcaacttgaactgattgtcgtacatttcggtgaccgacatcataaaggtcgaatgccacggccacttggtgaagtcgtcggtctcactgttgatatccggttgctgactcaacgtgtcgaagacctggggcagacatggctggtagatatggtgttcgaattcgcggttgaaatcggcgaccagtggggtcacaccacagaaacttcccgtcaaactcttgagagtataggtggaggaggtgatggcatccttggcactgataccaccatacgccttgcggccgaaacgggtatcgtcgtgctcaaagccggtggggaagttggtcaagaactcggcagtccgggtgaggttggcaaggcgttccacaacctcttggggaatggtcttgttcttccaggtttccgcgatgcgtttgtacatgaagctgtccttttgcagagggaagatatcggcacgtgcactctcgagtttcaagaatacgacatgcttgatcttcacatcgccgctggctagtgcgttgtgaatctcctgcagcaccggcttgtcgaggttggagatgtgcaatgggtccccatgcgggtcgtagtgcagcgccaaggggtcggattgatcccagtcctcgaaaccttcgagcggttccttggacatccaggtccattgaggtgcggggcccaatgcagtgatcctatccagatactcaaagcgggagggtgtgccagcggtatcgacgggggattgacgctccgcaccctcaatgatggtggtcaaaggcaaggtggtggacatgtacatatagaccgggtcccacggtcgcataaagcggagtaagaggaagagactgaacaatcccaggacgagggcccgttgaggtacaccgtcggtgactcgcttggaggcggggagacggttgggtaggcgagcggtgttcaacagatgatccccttcttcgttatcgctgagatcatcgttgtcatccatggcgatttgttcgtagattcgaggatcgggcaggtcggcgactgacgatttagatcggggccagaagcgctgcaccaggggctccacgtgtgggcgcagacgaccaaacagccaccgaacgggccaggcccagacatgcaggatgccgcccgagatggcatggatggaatgggcagcgaacaatgagattgtgaggaggatggcctcgacgatcagaaatccggtcagaccggtcaggagggtgtgaatggcagcggcatcaccattgaaggatttggcttggcgccagtggatctcggcacctgtgaaaacgtagaaggaggtattggcggcggccatgaaggagacgatgagactgcatattgttagtgacgagattaattaattgtattcagatcaagtctaaatctattgaaaaagacccgaaagaatgtagcaatgcagtggaaaaaggggcacgtggacacttacctagacgggataaccaagatagcgagcagagcggctcccggtcgccacgcgaccttctgggccagaatgcgaaacagcaatagcagcatcacatcctggaaaaagaaggtgagaccccataggaatagtcgcggcaggggtagagaatatatatgagcgtagagatggagcaatttggcactgaataacgagagaacggccagggtgaaaaagtagcgacgggcaaagtcccagacggcatccagggtctcaccaggcgagagacgaacacgccggatgccgtggcttaaataagcatgaacagcgtgaacgactttcatggtcatatgaatgaatgaaatgtgtatatatatacttcacacccccgacatttaagaaaagaaaagaagaagaagtcggaagtaagaagtaagggagaaggaagccaagggtcttgacaagccgagtgcccaggtgggatttagtggagacgatgactgggaccattttaggtacgacatacgagagacgtgagacgtgattatatttgggggttaataggtgattatggtgttaatcatgagctacgatggattaaatgtgtattagacacgtatcctcctccgcttgactcttctatatcccatcttaatacctatattctgtcaattaccctccgcttcccccccccaaggcccccccaagccccgaaagccccgaaaagccaagacaaatgaggccccgctctccggaattgaaataaaaaaataaaaaatccggtttctcctcctttttcctcctcggggcttattgtgttcatcatggtagggagcttattcggttggattgcgctccttttcgagccattagcctttcaggttcctctgatcgaacctcaacccagactcaaagcagagaatggtatagccgttccagcagagggcccctggcaggagatcatcaccggccattatgcggttccccccgtattgaaaatccatgaccgaaacagtgtggtcaaatggagctggcaacgagaagatgtcacccaacccctgcctcctttgattcatagcggcttatatagcgggttcaacgatgcgaccgatatgaaatggatgcggggtgggagaagcatcgctgccgtctacagtgccctcgtcgtggtcatcaaccacacccccgaccaaccctccaccgataagaaaatcaccttcgcccttaaccgagcaaacgatgtcctacacaatgcccatactatcgagcccctgcccggtgaccgtctcgccgtgggaaccaccggacagcgaccctgggatggcattttggtctacaacatgagctcggacctccccctcgtcgacgaaccgcccgtattgcaaaagatcgaaggtctgcgcgcgatccacgccatgatctgggatgagcaggggcagatgctgtgggcgaccggcaccgacgccgccgccgatggctccgaccccgttccggcttacggtgtcattcagggataccccttcgatgccgagacgggcctactcagcatcgacgaagcctatcgattccgattccccgagtactgggatatcgacgtcgaatggggccatggatacagctggtgggccgggccccatgacctcgtccctgttcccaacgaacgggtattcctcgtctccaacgatatcggtctccatgccttcgatatcgataagatggaattcaccgccgcatacgacgaggtcgtcgagaaatatatgcccggcttcgaggtcaccaccaacgaccggcacggcatcaatcgccagggcgaatacgtcgagttgccgcagtcggacctcaaggggttcagtctcgctcccgatggaagcttcatatacacccagtctctatggcgactataccgggggaattataccagtctcgtggtggatggtgtgcgtacccagatcatgaaagggaatgaaatctatcggtcgcgatggttcggcgacatcgatggctggcccaaaccgaagacttagtgttttaacctgtatagcacgcctatgggctccacatataaatctgatataatgaacgttctagctatgactttgcctgtcatttacaatgccttgttgacttacaacatcctcgcctccccatctctctacatccctatttcgttagaatagacttcccaaccccggaagaggcgttgattactttcccattgtgccaccataagcaaataccgtcgacatcggatatccaattccatgtactccgtactcctccctaccagaccttccattttcagaaagttccaaattaagacaacgctactccgaatccgccatggccccggccctagtcagggtaggtgacgcaagccaaaatccccaccaagtccctgacaaccctgacaagataacagggctgatttgttggcggatccccataggccatcgataaaccctctaggctcttacctcttgcctcctaggtgcatggccccagattccgaatccgaatctgactctgtgcggtctgtgctgagtaatatattgcaatgcaaccccccgagccataatccataatcattaatacgagcttactacggatacgtcgtacgggcttatgattccgtatctggcgtgtttcagaatacggtcccgcttgcacttccatcgccaaaccataacggcggttggcgggtggaggcgccttcgaagacccgcttcgtacaatacataacaggaggcgatggatggtgggtgtcgatcgcacagccctgaggagattgatagggagacaggacccacgcgccggcgaatcagcacgagacccttttcctgaaataggtagttgctggttctggttcgggttctggttcgtacatctgtgggcggcgaatcggacgtgagcaggagttttctggcgctcgccactgccaaggctaggaacagggattgggaatgggctaaacgagtaagagatttttatgggattttctagcacttgggtgggagactgagtgcattcatattcatatcatgcgatgttagatagaattcgtagtatggtatggagtacggagtagcaaggaaatatggctagagtgattctagttaatctatcagttgagttgattatccggacatcaatcctccggtactgatgcgagggatccttctatccatatcgatgtattcatgtggctggaaaaataagaattctcagtcatcaactaagccaacctaggtatgagctagaatatctgccttgtctcgtaaacgaaagcgacgagatacaacgcaaagaccaagtcccgtcaaagccgaagcaagctgattgaagtcccagatcgaagaaagcaatctttccacatcagccaaccacaaaggatcagcaaacatcgacaaagctcacgcatcaacaagaccctttcgctttaggaatagtgggattttggctatcatcgctgcatacgagtagattgtgctgatagaagcctcgtttccgtaagccagatagcttagggccgactgtccgtgtgccggagagccgatccatatgactcctcgcctgtgtttgcacttccacctgttgttgttgagattgagtgtctggagtaaatgtcctatgttagctatctgatgctcccactgatcactttgatattctattcttacttcaccaaactcttcagtcatgtcggtggtaatgtatggatgtagcttgtctccaacgagcactgggacttgttagcagactgagattgcatgctaaaatccttgcaaggggcccttcaatcggcatgaaagaagtgcttttctccagtagcgatcaatattcatagggaaagtaaactctgagtactccatttcgggttggggttgctcacgtttgtcattcacgtcatcctccttttttcccttggagtccttagggttggagtcatactccagggattcatactcctcatccatgtcgtaatgccccttcctaaagtcgtcttcttgaatcactggaacaacctcaatcttgatcccgagggatttgaaaacggagtacaacacaaggtcagcacccttgagtgccctcggaagtagcattggagcctcatcggatgtatgaggataagcgtgagagcaatagaacccgagagcgccacctagggagagttaacttggtattcttcgtccaaataacggcatatcgcaaacacacccttttgcatgaagccaggctccatgataagttcttgcaagtaaccatatagcggaaagctcttgggatcaacaatcatgcttggtggaatcgatcctcccactggctcggttatgtaaaggttgtacgtcaaggtgatccgctcgccttccgttattgttttgatctcgtgctcgcagtcactatagaatgctgcccactgaatggcaaacgcgctctgctgatcccagtcaaacacaacctgtcttccctcgtgattaacgaccaagtcgccccctttgaactgagagggtaaacaaacgaccagcgagccgatttgggtcttggatcgcggcgtgtccacatgctgccggaaaagcccagatggtcccgagtaaacctatggttagcaggcacattagtattcgttgcagaagaggtattggattagcatacattcagcttgtataactcggcactcagtttccggaagggcaaagagtcctgcgcctctgtgttgaagttcggaaggagaacttgctccacattggggagaattccgaattccgctggatggaagctggtgaagaaatgttcagggtcaagctttccagcctttcgatattcagggtcgataacatcttgctgtcctctgccaaagctagcaggatcgcaaactgccaccaactgacgcaaatcatcggatgcagattgggggttggcgttcgcatcaagaggtagagccaattctcgcgcgatattatcaccatctgtacgccagcagattctcactggcggagacacagagatgggtttggaggacttcgaattagctgcgacatttgtaccaatggggacaagacctccacagacaaaggttgcagatgccttttttccgacaacgaaagcctccagctgtttacagatcttcttgaacgcgaggccagtcaatgatggaaccgcggacttagacctcttcttgctcgaagaagccatggtgggctaagatgggaaacagtagggaggaatgggaaaaggagaaggaggatagttaagtaggaggagggaggggagacggtgaggccataaaccacaaacaaccctggaagggaggtggttgcctaaagttggaggtcaccatgcgtgccagcctgaattcaaacaaaagatgtctaggctacacctcctgcctagtcaaaagaatgcgcgaatattccatactaccccagcgtctgactgcaatatgacgtgcaataggatgtcatcagcgcaaagagattaggtgaaaactaaggctcaagggtgtagttgtagctttctgggagtcagttttcaaccgtttcatacctcttagaatgaagttgtaatggccgccagactactccatctactccgtatggagtagacatcttgatctatggcttatatacgtggctatacgtacctactatattgcctcgtggggctttcctatcctagctgccgccgctttcatatgcttccaaggcaaagaaaggcattcgtaccaaatgctatctctttcgaccattgcaagctcttggtcttgcttgttaccgacttttcccatatgacgaagccccagagagctcaccaggaagacaactaccatgccagcaaatataatccaatacgcagcacgatacccctcgagaagctgaccgcccgtttgagaagatgtacttgtatcgtttgccgagccatcatcttgggcggtggaggaagcggctatgacggcagtgacaaccagtccaacacagttacccagttgggagatggtattgaagacactcccagctagagccatcgagtcatcagggaatgcccgagaaatgatcagactagacacagtctatagcactagccaaacgataagtcggtatttgcatctttcatatcagatacacaagttgaggaagttactcaccattgattggttttaaagttatagcaacaaaggctgcagctcaatatttccagttgggggaggcggccgccattaaaataggtgaaatcgcagtcatcagtgcactcatccccagcagcaggttgacattcaccttcgacatcagatgagcagtaactatgttggtggccacgccaactacagccataggcaagaagcgaatggaagcttggagggccgagatgtcctggacgtcctggaagaacaaagttgatatgtactaaaaagagttgaacccggcccatgtgaagaaaatggccacacagataagacggcagatttcgccataaagcatttagaatcaaggctggcctgttgtgctttacctaccatttcaccaaaagcgagaagacagggaggagtgataaagagataacgggtagcacgatgtattggggctcatacatattcctgtaggtatatgtgaccatcctatagaaatgtcagcaacattggataaggaattaaataaaaagatcaaggatgatccacgcaagtacataggatagcaatccaaatgctaaggcgagagttgttacgccaatccaatcaatattgtaagcaagcttataccctgtttcccggcatagcttcatcgaatccgggtccgatggaaggatcaagatggatccgatcaacaatacggcatcgataatgccggtgatgtaaaaccttcatcaccagctaatggtattggtgaaaacaccaccaagaatgagtcccaacacgtagcctagtggctgtcccttatgtcgctgcaaaagcaatgtacctctagcgcccaggtggaaagaacgcagtgactagcgacgtggatgtcgggagacacatagccgcaaagagccctagaagcgcacggaaaatgatgaattggttaccagtgcgggcaagtccacgagaagccgctcccgatcagccacattctcctagagccaaccacatctgcaacggagccgaatgctagcaaggtgcatcctgcagataaagcatataccgatgccagctagaagatcagattgtggtcgaggttgatatcggttgagatacgaggaagtgcggtggtcagaatttcagttcccgggacactgataaaagtgacaccagttattatgtttataatccagagcgactccaatgccgacttgccattcttttccaatgactcctcggatagaacgttcccatctggctttggcggctctctttccgtttccacgacctccttgtcgcgtcttttatcgtacgattccgccaacgccggctgttgtggtcacggtcgtcatggtcgcgaaagctgctttgtctcacggtatgagagatgaaagagaccattcaaggaatccggtgagaacaacaggtcacccagccctccaaatatgacggaaggaagttgagaagtggctgaggaaatcaagtaagtaggtaggcggcattcagtctaggtctacaatgagggaatattctgtcaaaggcggggaggcgaccaggtgcaggggtacgactgtgtatggcgcgtatagcgctcaagcctggatggcatgcctgaatgcctgattcgcgcctgatattgctgcctgattttagaccatagcatggcaaactatcaaccaatatcccgtacaaaatcttttttttccggtgtgttttaacctacatttccagtgaaagcagtgatgtcgtgccatagtgcttatattatgtagcctacatatactccgtcttctctgcctttttcattctctttttccattcaaaaacatatatatcttattcttggtcaaattgatcttcaaatgggcttgtcataatagaggaagctcgcagtgcgaactcgcaatcatatttcctgagtatatattcaaggaaagaacgataggcagtctggcatagcagacaagacgagagcaaccaacaacaccaaccttccaagtaggccagctagcaagtataggggatcatggagcctcagttatcattcgatcttcctagaaaagtagcaccttgcaaaatctccttcactctgagtctctaccagacatggtaaaccgaaaatcctttctgcctgaaaaacagtgctcaggctttgccgcttttttctcactgacggtccattacataatctgaatgatttgctcacagattatgagcccctgagcatcctgatccacccactgatcatcctctaagcactctgagttgctcaccgagtgctcactgagtgtactcctgagtgtactcctgagtgtagaaatgagcggtctgaggacggattacggagtaagtttcatgaataactataaatgcgacacgctgatcccatcacgtgcaaccctctcatagatcgcccatcaacgtgactagtgttttgcatctgtcgacagacgagtctcaatctaggtattagatagaggaattccagtacccacgtatacctgcctttaagcatattcataaggctcctatgccctaataatccgtataatgaacgttcccagtgcaactacctgcatatgatgtcactgaagaattgtggagtaatcttccttgaagaacaattagatgggcgtaacccagtatgaattcaggcattgatcagcataacttaagcattacatattaactaactagtatagatgataatatctattccgagtttaatttgaccgaaggccaaaagtctccgacaagcttggactccggaggaattccatggtcgtacgccatatcaaacatctgatttgtggagactttgctcggagaatcgccctctatggtttagcttgacatcaaattccacagaactcctagacggatctttaatccgtttatggtttgatccacacctatcagagatttcattggcagtgatgtgtaggaactggtagaaaatggcgcggcttaggggctagatgccgatcaatcaaagacatgtaaaacttgtcagttgtagaagctatttggtttaaaaggagtgccgtctgccttttcctcttagcgctaccatccttcattttcctgcaaaattacatttacacaacatcataatgagtatcacttttgaggttttccgcggctccaacgagggcaagatcgtggccgacaagaccactcgtgtcctggagcccaacgaggtctacatcgagacaacacactccggtctgtgtggcacagatgaacactacctcacttccggcatagctctcggccatgagggtgtcggtatcgttcgccagctgggccgggacgtcaccagtgtaaaggttggagcgcgtgttggatttggatacacacactacgtgtgtggaaactgcgagaagtgcttatctggtacgagttccaacccccaaaccaagaccgacaacttgctaatagtaaaccaaaatcaggctgggaccaatactgcgagaataagaaggagtacggctcacacgaccacgacctaggctcgttcagcggcggcaccgtttgggacgctcgatgcgtcgtccccatcccggacggctatgagtccgccgacgccgcgcccatgatgtgtgccggcgccaccgtctggacctgtctgatggagtacggcgtcaagccgatcgaccgggttgctgtcatgggtgtcggtggtctgggccacctagccatcaagctcgcttcggcgatgggctgccatgtggttgttttgtccagctcagacgcgaagcgcaaggaggctttcgagttcggcgcgtccgaataccacgtcttccgcaagggtgaagaactcgaggacttcaagcctgtgaaccacctactgctttgcggcagcggcagtgtcgactactccagcctcatcccaattatggatgtacatggctcaatctaccccttgactgtcgacatggttccctcgcccgttccccttgtgttcatgaatctcaagggcatccgtatccagggttcgcttgttgcatcgcgccgcagtctgcgttcattgcttgagtttgttgccgctaagaagattaccccgactagcatgatcttccccttgaccaccgaaggtatcgagactgctatgcagactctgcgtggtggaaagatgagataccgcggtgttctggttcgggagtaaatggtgatcagcatagatggagagaggttttaatagtcagcatgtattatattcccactagtattagaacgtttatagatatggcaagtgcagatgcaatacacgaaattgagacaatacctcgttagggtatgcttaaattatggcggttggtgagattttcacatagacatttttgagaatagaaaaattagggtatgagaacaacgttaccgacttaaaaggcttctttaggcgctaagatgctgatgtggactgtgctcagctgggctgtcttctgattggctcgtttatacgaggcttgccaagcatgcgtattcggcttcaggcttggcaaaccattaaaccatcctagtcccccatgtagctcaactcaactggctgtattttcgaaaattgagatcactgtgtaaattcacatgttatatagggtacttattcacggttctgacaatctgaacgtgtttatttacaaggccctcgacgggaaatgccatgaacaaccaaaaaaaacaatatagaatacatatatcaatcaatcagaaaagccaccaactcctggtattcaccggatcaagctgcaccatcatatttctgtcgtctcttcatagacttccattgaacaagtccagcaccaataaaagataggagtgcggcagcaacagacacgtagaatgtctgaatgacagcaatgttataggcgtgtaggacggagggcagcatatttttgggcacgcgctgcgataaatttgcagcgccggcttttattaacgcgtctgagttgatatttggagcataagccgttatgcttgcaacaaggcgattctcaaaaacggtttgagcaattgaaataaacattgcgccgctgagactctgtgcaaatgtaataatggcgattccgattggtatgtcctgtaatggcagtacagtctgaagtgcgttgatgcattgctgaaagccaattcctgctccaattccaagaatgacttggtatccaatccactccggatatccgctgtttactctgaacgtcgtacacagtccagaaccaaccgtgagaaatgcgcttccaacgaacatgagtggcgtgtagtatccaacaatatttaccaataaccctgccaaagcagagaacacaatcatagccaccaccatcggaagattgttgattccagattgtgaggctgaatcttccttgactgcttgaaaccagatagggagcttgaaaaatgttagcaatgaagctgataggactgtattgagaacccacatagtatccgaagacaaaaaaagatccacctaaaaatgttgcgtgaatcactgccccaagcacatttcgattcttgagtaaacgaggcggtactgtagcgtcgtcctgcttccagacctggatagcacaccacgcaaaaccgaatacgccgaatagaacaaatagggcaattattcgagcgttgttccagctgtatttggtgccgccccattgcaggcataacagaagggagacgacggcggggatgaatgcaagtataccaagaggatccattcgctgtagttgtccaaggcggcttattttgggttttggtgatgtagagtccttgaagaagaataaaatgacaaggccggtgaggacaccaaaaggtatatttatccaaaagcaccatctccaactgacatgatcagttaagagtccccccagtctatggttaaattagccgccatctacgatattggaataacgagacttacagtggtcccgtaattgtcgcaatcccactagtgctaccgatgattccgaaatagagggcacgccggtgaaggggcacaccattcgcaagtacgagtagagcacccggggacaatcctccagatccgatgccggcaattgctcgcccaagaatcaatcccttcgatgttggtgtcactgcacatatcagagagccaagttcaaacaagccgagagcaatcatgtatgtccatttcgtcgagtaatatgtgtataccttgccaaatggtagggtgacggcacatgtggttaaaagataagcactggcataccacgacaagtcgcccagtgagttgaattgttcagtgattttgggaacggcggttgagaggattgtgttgtcctggtaagtcgtccgcattagctcatgaaatagtaaccataatcgtcaagcttaccaaggcgatacaaaaggattgaaagcaaagtcctatcaaaatcggagcaagctttgagcttgatggatagacttgcttttcttcttcatcatcactgtccccagttcgagcctctttcaatgggatgtcatctcgatttgtatagacttcatccccgaaatctttcatgcctgaactgtgtgccattaaactgcaagttaaatcccccagttgttattgcaactgtgagaactcatagaaatctgtttgatcgaatcatccgtgctgaagcctgaggagtgtttgaaataggcaaggtagaagctgccacattaaatccaagtgtggatgtacagaacttgccttgtagtacatcatgtacctacattactactgccggatgtaacccgataaagcaagggggttatatcttgatttctcggggtttttcactttgtcctggtcacattcttactggcttgattggtatgcaccacttcttccccgacaagacgcttgctagacccaagcagcatatacttatttgatcaaattatatggatcatgctctgaaaatatcacttgcccaattgaataatcagtctaataacaaataaggctgtatcatttgacatcgttagtcactcgaggttgatcacttccgacgtgatgaatctcgagacccttcattccagtgagactgtaacctcactaaacacagaacctatgatggctagatacttttagtaatgaatagcttcgaagcctgtgcaatattccgatggtcttccaatcaatgtgccacctctgtataaccaactaactcgcacaaagcttgtgtgcgttttatcattgtcaaaatacactgattttctcatacagaccaccaagggttatcgtggccggaccactgttaattgacgagataatatatatacaaagtgcaaattgatcgttggagccggaataaacgtggtagccacaaggccacaacatcactcattaaagtaccgtggtagcagcttgagcaagcctcaccaactacccttgtataatataaaattgtatactagatatccaatattgggaggactaattcgaaagactctagtgatcttattgtagtgcgaagaaaacataagattgcccgaggagactcagcaatcgcaagtatctcaggcctcatttcgaagggatggatagaaggggcacccggctaacaggtttctagccccgtcagattttttaggaattctgatccattaacgatgtaagtagaggagtgaatattattccgaggaatgcatgtgagctgattcccaactttattcttctatgagctctattcttaccaacgagaatcgggagctcatactaggaagcttcttgagctgtttatattatttccaacctattgatcacataatcttcgctcgccgatttgaggcctaggtataaagcttttctttctttttgtgcggattggtccacggatagaagatattatgacgagctcgaacgatttgtcagtgataatgtagcggaagtgcagtaagcctagattcgatggattgtatgtgatttgtgcaccgatacttaaattcttaagactagatggcatgaaagtatatgttccgacacctagcggcgtgctatgaggagcattgtgccgtgggagacttgacagtgagtattcgagagggaggatactccgtggtggttgaccagctccgggactcataattttccgagaacggcagcgaaacaggatgtaaagcatgaagtcggattggaatgagggtagaagagctgtttgagctacgtaatcactatttggaggggcaacccctccgatacatagagtacatatgtaaataccgagcaaatcttgaacaattcggatctctatcgataaaacgtgtcccccacaaaatcaacaaggcccaatagttcttttgatccatatccggggcacttcagaccacagttatgacgcaccagaatggaaacccgacggtattcagtagtgatctccaagtttatgaaaatgcgagatacagaaacacgcgctggagcgccccgaaacgtcatagaccgcgatctgcacgccttgtcctagaactctatcagtcgggccaaatgacttaagtggctgatgcaagggcatcattctagaaaatcatagttgagaaaatttgtatatcgatgtgctccatgtcttgaactggtgccgccatcaacactccttcaggcaaaaactccctagtctctattaggaatagacccggaatatcaatattccttatcaacaatcagcacaaaaatacattgctgaccaatcagtatctaccgctttggtctatttactttcctttccccaccgtcagcttagagtcaacttcccatcattcctgcaatgcccgttacagttgcgcaaattctcgcgccctacgagtataaaccagagcaagtggagcgggtagcctcccgcacggtacaacctcccattaccatagttgagcccaacccagaatggccgcaacggttcgaagaagtcaaagcgcggattcaaaaagcccttgggcccttggtctcggagattactcattccggctctaccagtgttcccggcttaccagcgaaagacattattgatgttgatgtgacactgaaagatgccatgaatgaactatcctatgtgaagcctctggaagaggcaggttttcggttcatcttgcgcgagccgctttggcaccaacaccggttctttgtggagaactggcccgaagcctaccacgtcaatgtccatgtgtggggtcccgactcgcccgaagctacgcgacatcgtatctttcgtgactggttgctcaaaacgccatcggatctagaactatatgccaaagtgaagcgcgaagcggctgaacaagcggctatagctggcgattcgatgatggattataccctacggaaagacgaaacgatccataagatcctaggacgagcattccgcgatttaggctatatttaatgaaacactcaagaggcgattaaattggtactgtcacgatctggaggatcggtggctcgctcctacccgttgcgctcctacccgttgaggaaggaaacgttccttcctattgcgcagggaagctaagcccgcgcattaggattttgcagggtttgtatgatttgtacttattgtttcgttgaaacttgagatacggagcccactgctccaacgattaacccatagacctttatccggtagatatgaaatagggctgtatatattgtagaagtggatttcagccggaactgcctgattaggcaagttgcattgctccccaggattcggccccgggttttatagagtatggagtagtggagaggtgacgcgcaacatgtggggattggtggcatggtgtatatcacggccaaggttttttccctttttctccgtttctcccctttttcccctccaaagttgatctcggagaaagcacccgacaaaacaatacaaggcaatctagggctaaaaaagagagaccccatgcgggagtctttataggaacaagagactgaaagagatctataggcgcaaagatatacactatagaatattttatttctccttcacgcttgctaatgcaagttcatattttccggtgtacggagtacagaccgcattggggaatagaaagacatatgagactctcgctcatatgaacactgcccaagtgaccctgtgcccgggctgctgatcagagaggaaggttaaacaaataacaagctattattggcacttagtggcgtacattggcattgaatttcctaagagtttccacttggctgaaatctgataggcggaaaagtgatcggcgggctctgatcgtgcacaagcccaaaacacccgctaactgagtctggagaagccgagagattgcttaatgaatttgtatttatgtactacctgggtgagacaggtattgattggatcgggtgggcactcagattccaaaagtcgtggaaatgtactccgtatcgggttggcctccaatgtccatgcaaattgttgtaaacctggaggtggtgggaacagccaatccacatggagcctgcttgctcgcatagttggattcaaggataatagtggaccccgagcagtagcttcaaatcaaattatgtgtttggtctggtgtacaaagtatattgaagcggagggcaagaaattatccaggccccctggtctagagaggtcaaggctcctagaagctttttaaaaccagccgaataccccgcgatgatcattctttttttccgtgttatatatattcctcattttatatcttctggcgtttcggtctatatattggcagattaaaagcatatagaggattatcattgaacgacgccactatgcagaccaggcggttcttgggcctcaacggcaccaagcttcagatcgccatcggcttcttggctggcatggacttcctgctgtttggttatgatcaaggcgtgactggtggtttgctgacactggactctttcgtcaaatatttccccgaaatcaacactctagattcatataccgagaactggagctcagcagcaaagagcaaccagtcaacccgacaaggtatcacggtcgcagcgtacaacctgggatgtttcgctggctcgattcctacaatctggatcggtaacattttgggtcgtcggaaggctatctttgtcggttcttttattatgtgtatcggtgccatccttcagtgcacatcctacggacttgctcagcttgttatcggtcgattggtcactgggttcggttagtatggcgaaacacatggagtagcaatccattaacatgaactgcaggcaacggaatcaacacctctacggtcccgacttggcagtcaggtaagcaaaatgaagacaatcccgcctcactgtattgttccgattcgcctcgccgctatatcttgattattgcgagcgatggattggcgagagtggcagtaaataatgaaaattatctaacatcgagtagaatgctgcaaatcccaccgacgaggtcagatggtcatgatcgagggtgccatgatcacatgcggtataaccatcagttactggatcgatttcggattgatgtttgcagacccaaacgaagtcgcttggagattcccgctggcgttccaaatcttcttcgccgcgattattctgggtttcgtcatgttcctccccgagtcaccccgttggcttattctaaagggtcgcgaggaagaagcaaaagagatcctggcatgcttgatgggtgacgaggctgatgagttgttcatcgacaccgaattcaccgctatcaaggctactgttctcgaaatggcaacgggatcattccgggacatgttcaccatgggcgaagaccgtcatttccaccgcactatgttggcatatgtcaaccaaatgttccagcaaatttccggcatcaacttgatcacctactatattcccacccttctggagcaacaggtcggactggatgccacgacttcacgtcttatctctgcatgtaatggaacggaatatttcatcgcgtcctggatagccgtgttcacagtcgaaaagtttggccgtcgaacactcatgctcttcggtgcggtgggaatgtcgatttcaatggcggtgcttgctatcgccgacagcatttcctcaagccacaaacagacctctataggtgtcaaggcaggtgtggcacagacagtatttctgtttgtgtttaataccttttttgccatcggttggcttgggatgacttggttgtatccagccgagattgtcccactgaagattcgtgccccagctaatgcattgtctacttcttcgaactggatttggaacttcatggttgtcatgattacccctgttgcttttgaaagcattggttacaagacctatgtcattttcgccgtgatgtaagtcctttttggtcccctatcactatattttgtactgaccagcttagcaatgctgccatcgtgcccgtcgtctatttcttcttccccgagactaccatgcgttcattggaagagatggaccgtatattccgcaaaactaccaacgtcttcaatgtggtctcgcttgctcgcactgagccccatatgtatggttcaaatggtgaactcttgcgtactttggatgatgtcgaggatgatgctgttcgtcgtgccagcttcctaaacaaggagagtaaggttcaccaccagagccacactcagcacgcagagcaatacagcgacgaacacaccagcgaggtgaaatgatctcggtctgttgttttgagatcatccgctctcttctccagacatctagtatgactttactgttctgagccatactgagttattcatttgtagccatctcgcgatctaccccaatacccctcgttagactgggcgtttttcattctttcatgatcctgaaatcacattgcacataatatttctccattctccagctccattgaaccttgtacggcttcacttggtgcgctctcgagttctgctttaagacacccagtgttatagattctatcgattcaaaagaaatagggtttgaacacaatcgttggccattctatgagatttaggtatatagctgatctctctatggtctatacatcaaacccaaaagacgaaaaaatacatcagaaacacacgtatatcgcgagaccaaaaggatttacagcttgctcttggctggctcattcttgagcaatgccgagttccatgggtaagggtcaaacaccaagtcgttaacagggttctcctcgcttgcgcggcggaacagatcctcgtacaccttgccgtcatagcgacccaggctgctgtccaggtgccagtcgggaatcgcccaagcatcgaccaatcggacagcgtgcgggcggatcgcgtcgagtagctttaatacggcagtagtacgagtcaaggtaatttgtcgcacagtaaccgcaccggaagagaagaactcggcggcttcacgctctagagtgtgcagcgagaagagtctgaataattgatgcaggaggcccttggtctctggatccaaggccgctgagagttcaggggaggaaaccgcctcgtagaagttcttcaccaccaggtactgagaatgagacgtagacaagcgccagaagtcaaccaaaaggctgttccaggagcgcttctcagcatcccgatgcttgagggcctcgaaggtcagatgagctgtgcgccaggcaaaggcagccacaatgtccttgtcttcatcgagcacatcgaatgaagctcccttgtcgcgacggtcgaggtatgtctgaagaatgcggctagtgtcgttatcagccggcttaccggccaggacggcacgggcagatttgagaagctattaatacggtcagttaggagtaaatagaatggaagaaagaactgcgacatacatattgtgcaacctgctgggtcaacatatagttatcaccttcccaagtcagtgtgggcagataatctgcgtaagccggtccaatgccgctgtagctgctgtatccgtgaccaccacaggcgcggcggcagacctccagaccctcaccggcagtggtactggcgagagccttaagaccacatgaggtggcgtgcagatccgccaggaggttcgcaccggcacggagttgctcgggtccagcgccccgcgactcctggtcgggcgaactggctgccttcatgcggctttgattctcctcatacagacgcatcataccgcgaccagtgaaatgaagagcatacatagatgccaaaagtggaagcaagcgcacctggaccatcttatagttcagtacttgggtctcacccgcgttcgggtccgaatcgcgatcctggaactgcctccgaaccgcacagtaacgggtcgcgatagtcacaccgcgagccagaacaccaccggcatctagaacaatgttggcgcgcacccaggtcatagtaccaaagacaagagatggcacagcaggcttagtatagcggttcgtctctttgtcgacctgacagaagcgggccagcatgttcacatggggtatcttgacgttgttgaacagcaggaaaccattatccatagtgctaagtagtcattagtgctgataccggccaaaaaatgagagccgacttacttgtagccaaatttggggccaatatcgcccacatatacattatccaatggttgatgggtttcgaggtcacggacctgcacgatgaatgggtgaggaccatagttcttgccatcaataaaaagctgggccataaccacagcgtgattggccgtgcgaccgagagatccaatccaccacttcgaagaagtcaatgttggagagttgatggtgaatgtcttatcgtcggagttccaggtggcggtggtttccaaaccgcgcacgttcgatccatggcccagctctgtttgcgcgtagcaaccgataatctcgtatttttctgcgcgttcaaggaacagcttgcgctgctcaggagttccttgctcgcgaagagtcacctagataacgaccaaagtggttagtttagttggagagttggattattgacaagggtctaattcacttactaggaacatactagcgtgcaaaccgtaaggggtaggttcaccaatcaagtcattagccgcatggagctcttccatcgaccatttgtgctcttcggcaagctgctggaggcgcttggccttgcccagcgatcgctggagccgctctacgcggcccaaagtatggttctgagacttatcaaatactttctcgggcttcaaaagagctaggatggacgctcgtcgctccaaagtttcctttgtgtgtagcaactcggataatctttcgacgttgacattcgattgagcacgctcttgctggaggagctcagatccttgcggacctgccggcttcagggctttaacccaatcaggaggaggtgacggcattgtgaaaaaaacgggatatattgggatagatgaaagagagaggatggggaaagatggggttatgaaccccagaaagaaggagaaaggttagaaggttagaagggccgaggatctcaatcgggaaagagcctcggcttaggagggctgaccaatcagggaagcgcagctcggaaatggccccggggaacttcatttcccgacctcgggagggtcgactccctaatttaccacttcccttatgtatggaggccacaaaattatacacaattactaactaccggtggttcattccgcaggattccccccgcataatggactcgttttgatatggggaagcggggagagaatacatacttttgacggctctcacggttcaactagtcccgagatcagcccgatcatcgggtattagaacggcttacgggttctgggaaatgacctaatgttttgcctcagctatgctcacgtgttaccaaaaatatccccggatcatgcggtcaatttatttgagcgaaggaaaaaaggaaaaaagaaaagagtcacgtggaacggggtacaacatatgatgttgtacgggatgagcgaaaagtccgaattatcggatctgataacaaaaagttcccgcgtcattctcacatgtcaaatgtaccaacatgtgagagtttttgtctattcattgcgcctgaccttggacacccgcggcaatcctagccacgtaatcagaatcgcaccggatagggcaatgataaatggctgcagcactttcactcccttggcttgtgcaagcacaccaacagcaaaagggagaatagcggccccgctacctccgaaggcagcgacaaatcctattgaggtaacatgcagatgccgaggaagaagcttcgtaatcattaccactgctccggggaaaaggggccccagaaagaagccttgcaaagacactgccacggccgatgcataaaattggggcacaagccatagaaccaaagcaaatcccatggagcaaactatgtaaacctggtgggaatcagtctcgttatatcgcaagacagcgcgatgctcaccgaaattgcgactttctcgccgacccggggcgtcacaaaccctaacattactcgcccaatcgtgatacccaaccagaacccagtagctgtcataccgctagcaaaagcgctaccttgccggactcgaatcataaaagtaacaatccaccctcccagcgcgacttctactccaacatatcccagcaagaacaatgcacagagccaagtcacccgagcagctgggcgcttgaagattgcatccctcaagccaccctttttgttctcgtccgctgatggtacattcaatgcacggtaatcggcagcagttgatttccagaagcatgcgccagaaaataccagttcgatggccgcacatccgatctaatcgattaaacagtggtcaaatagctgcgaggaagttcagcacttaccatgacataataaaagtaataccacggcagaccacccttggcaatcattgacgttgcgaccaacggccccagaactgccccggctccatagatcccatgtaacacccccaacacctcatttgcattggccatgttaccaatccatgcattccacgcagaatcctctaggccatttcccaaacctgcaaagacgaatgcgaccactattaccggataaggtggatgaacgcagttaataatataggcaatgagatgagacgctggtccgataatggccacaccgcgttgacctagcatatagtggatgcggtgattgagaaaagcggcggccgtatagcctactagaggtgacaagaaaatgagagacacaatcgtgtacgatagatggtagtatgattccagctgtatgctggatgagatagattctagttaattgtagggaattcaacttacgtatggaattagagcctgcgaacggttagtagatagctcaccaaattgagaccacactgtctccttttgggcaatatcaacttacaccatatgctgcgtcattcgcacccatcacgaggaatgaccagaaagttgcaaaggttcgatgaatattcacgcgaggctggttccatttctctaacaacggaaattcagggcccacgggtgaacctgtatttgactggccatgaggcaacgcctcgagagcgataaggctcgcatcgcgcggattttggatcatacagtcagttgccatagcgcgtaattcagtgctgtaagaatttttgggcaagcagaacaaaaaagcagccataaaagtccgcaaaaagccttggcgcggtggttcaacccgcattgccggattgagatgaggggatagtgaggcgtagtgtagttaccccacattgcttcggtagaacttcggatgaggatgctactgaacgggttatcagccaccatttccggttacgttccgacaatggttgcgcttgttatttgtatgcgttaagaggtcatgcactagcagatgatttctgatagatcaactccatcatcaacgacttattgtgaaaagctaagtgctgtactaagaacaccccaagattgaagctctcacatagcgtccgtggtcgcttgggaccccatcgagtacttcgtccatttcctcaataacttctatgcattaaatttgatatccttacgaagaataaaagcattggatcgttgaaacatccctcgaattctaccatcagcacttcaagacgctctcctctgcaatacgaactcgcgcagtatttggattctacgggggttgtttttccaccaatcagaatatgttcatttccttataacccaacccaatgctgcgatcaaatcaacatattctaacagcaatgagttacattaatcccataatcccgggatttaaccctgacccatccattattcgtgtcgataaagactttttcttggtcacctccacctttgaatacttccctggagttcccatttaccacagccaggacttgattcaatggacattgatcggtcatgcgttgacacggcccagtcagcttcaaattcatacgccagagccgggaggaggcgtatgggcaaccacaattcgttatcacggaggtgtttactatgtcatcgctgcgagctttcagcgttatcgtcctcaacaggatgaccgagtttggccacaagggttttatgttaagacgaccgatatatggaatgagaagacatggtctgatccagtctattttgatcaagttgggtttgaccaagatgtgagtttgaagcaatggtatcaccacatgcatacatcacgagaatgacaattgaatactacagcttttctgggatgacgatgaaaccgtatatttatcggccacctacagaaagcttcagccaagtgcaggtgctaagctgaaagactttgcgattcatatatgtactgttgatctggccaccgggcattctacatctgagcctaaattgatccgggaatcttgttctggtgttgccgagggatcacatattttcaagcgcggtcgttattggtatttgtttacagcagagggaggtactgaaagcggtcatagcgaatgggtgaaccgcagcgaggtcggtccattaggaccgtgggaactggggccaaataatcctctctggcgcaatggcgttgaggacgaagtgcaaaacaccgggcatgccgatctggtcgaggacaccaaagggcaatggtgggcagtccttctcggtgttcgtccttcaagacagggagatacgtgggaagagtcagtgctaggtatgacctctcaaagtatcagttagttatcatactaaccttcccaggccgagagacatttctagttcctttggaatggaaagacgattggcctgtgatcaatggaggacagaaaatcagtctcgactcctacggacctggtctgtacaaattccacaccccagtttcctggagagatgaattttcagatccgcaactgcaagttggatggtatcgaaaaagtgagatccgaagaacgaacccgcctgatcccatctgactataaaacagacacgccctttgtaaaagactactcacttactgagcggcccaatcaccttcgtcttcacggcggaccctataacctgtcagtgccggccagcccaactatgttccttcgcaagcaaacccaccagctctgcaggtgggaaacaaagctctcctttcagccgatgatagacgaaaccgaggctgggactgtggtgtggttaaactattttacctatagcagcatcggtatcaggaaggatagcaagggccgttttatccgttttcgaccatcagagggcgacgtcgtggaacatagattggatataaaaactgatgtcactctcacggttgactgtggcaccgagtatcgatttgggtactgcgaaagcacagaatctgacatccattggatcgggtcagtttctaatagtgctgctatggcagcacctccggttggggctaattttactggaatgatgctaggtctatatgcatttggagagcgccagagatgcctggccccagctgattttgcgtacgcagagttcagataagtcaaccctataggaaattgttgatgctttgtgttaaataatccttttgtttctcctccatcttctttcaataccgtaagctagtttatgcaattgtatttctccttagttagttaccttctttccccttacctaagaagaataggtagttcgtgagcggatccatcgggtctagaagatcagtcgacaccattccggaggatctccgacgaaatatagcagctttccaattctacccgttatttggctacgcgtaacttacttcggaggcatggtagtcggcttggtattagaagcatccggggcccgggcagtgtactaggctgcatgtgaatattacccttgagcttttcaacttcagatctgctattccacgctcacatctagaacttctcaacgtcgcgtgagagtttgcatttccttctgtcagggttgtcactgagattcgaggcatgtgtcttcaatttatatgggtttgcaaatcgcgcctactacctgcgatttgggttgtaaggttagatatatcctttcagtttggtttcttattctatgcgtactctctcagcatagtcaagaccgcccctaatcacggccaggtcgccaccccgagttaacataatatctctctttgccaaaccacaaacgacgtccctcttcccagagaaccaatcgtatgggacgaaaaactgctcgaagaccttgatcgtcaggggatctttgcgttgcgcgatctctaacccactctcgttgagatcaacagagcatacccaagaagaccgattaaggaatacgagtttccttgattcgtcaattccgatgacatgggcaacgcttagtccgaatgctgtcatccgtgaacgaagcggagcggccgaactcaatgttttgaccattttctccccctcttcatccgtgacaagtggatcgaacgccggtacagcatctaattgcttcccttgcaagaagctgctatctctgttttcgatgacaaggtggtttaaatcaattatcgtaattctgttggagtcgacggagctgttcggctgtaacaagtctagcataattctttgtttttggccgaccgaatagaggatcgcgcttttgagctctgccatgtcatttttcagcgataatgcaatgcatgaaacttcagaccagtcactccaggagtaggcgcagactttggtgttgtcgatacagacaatgtgtagagaggattctggatgggggagccatttgcggattccgggaatttgtggatatgttcgctctgtcgcacacttaccgctgtccaagctgaacaggtgatcagactcacgagtcgatactaggaacttcgccgccatttcccctactagcacatctatgattgccttctcggagtcgaggcgggatttgaagagtaccgtcaaatcactaagccagcctttgtctgctgacttctgcattctgtgtaggaagatcatgttggaggcatcgacactaaggagcgcgtctctccgttcaatccagaccaacaggcggactggtgccttatggcagtatagagtcttcaagctcgttgctgttttctgttcgtacagtacgacagatccatcatcctttccgcaaaagataacttcagacgtgtgatggaccaccatggcagtgatcttcgctttggcttccacggaaaccgtctcgaccactgtagtgaaagtggtcccgctgctgtcatcgctcaaggtctcccgcaacagagtttcaggttcccacacattgcactgggcgcctcgtatatcggcaaaaagcatactgtccctggcaaaggcaagctgcttgatgaatgagttggatgacttgacccgatacaggagcttgaagatatcaaattcataaacgtggataatcccgtttgcaccacccgctgcgaggagacacccattgggacttggagcgagggtttggcaattggcacgaaaacattccagctgccgatcggcaaaggggtcaaggagggcaagatcaccatcgaggtacactactgcgagaagactaatgtcaggattggggttgaaagcaagcgcaacgacaacaacatccgtgcaggtttctccgctggatagtttcttgccacagttaccagcgtaggcgtcctcttccatgtcccacagcacaatgggttggcggctgtaagcgacggcaagcattccgtgggtggtagagagagccagtgcgcatggggtcccacgcggaggcgttcggttcgtctctagcgtatcggtatcgctccatggcctccgcaccgattccggctgggcgccgtgtcccaaatcccaagccgcgacataattgttgcgactcacaattaaaagcgtacttccatcgaattccatccccaccggactgggagggctcgcgatgctgtgcaccacttgcccacttctgatatcccagaccttggccattttcataccacaagttgctacgaggtcagttttgggtttgaaagcaatgaatttgactgcttcaccgtgctccaagaccttgtactcctggtacgatgtggcatgatacaatatgacagttcctgaactgagaccgacggccaggaactcgtctccatagcgcaaggccctaggttgaccttgacggaaatcgatgcacagcagcctgtcatcccattgcttgttaggtgtgccaggcacttcgagcctccggcctgagcgcccagtgttctataccatagactcggtgggacagaatggaggtaccaacgagtatattgctgacggtgatatcgtgagcgcgttggcaaacatggcaggaatccgagcaaggtccgttgtccactgtcgtagtgcttgtaaccgagggtccagtggtgaacgctcaatggcacatgcattgacgtagatcttgagatgatttgaggcgcggataaggtgattaagacttttcgagtcagcaatcgtttcaatccaagtgaggacattggatctgaagaactgcacggcaagctggaatgtccctgccgccaacgggtcagacctcgagagatgataggagtatgctgtgtatgcataggcggcgaaatctaatcttgctgctggcaaacgtgccgaaggacggcgtcggctgctcctcggaggcttcatttcttccccgacaaggtagttgagacacacccgagccatccgtgtgtgtgcttgagttttttcgacaaagaattcggactcaagtccgccggttacaaggaattgcctggcagtttcatccaccatattaactctcccatatttgtccacgaccaccagttcaccacaaagcgtggtgatactctcctccaaccttgggaatgagtcgtgggtgtctaaggtcagagcaccatctagttcactgattgtcattggtcgaattgcgcatactgcccacataagaatatttttggccagctcttttcctcgagcagcctgcgacatataatccaaagtccgcttatatagtgactccatgcctctgggcacgtcttcaagaatctggtaaatttccctcctgctgtggcagcgtataagttcttcgagcactaaaattgtccacaagaaggaccccatagatttgtctagtatcttctcggctaatgtacctcgatcatcaggtccgacgacccctaaggccttggttctattcttaaccaaaagactgagatctgactctgtgtctattatcgagattggcaaggactggaccaggtcgggtgcaatgaacgagagaccttggtccagatcgaccgtatacgacttgtgatgagaattctcaggggtatagattcgtccatgttggaaataatggcatataaaaggaccggaggattgaaacactcgtctagggcgtcgatgacccagaaatgccgagtcattgtggcctggaaaatgccagaaaggaagaggattctccagagggtatgttcgtcgacacgatctaagcaaacaccatccgcctgtattcctagaatcgcatcactagcttcgctattagagctagccatctgaaaagccagagatcggagacaacaacctaggttggacttcgacttgtctccatgtttgaagaaaaagtagctgcatgtctggccagagtccttgagctgatcgatgacatagccagcgagaacagattttccagttgctggcttgctctttatccatagtgtcctgtcatttccggattccccatctctccatttgacgtgactggctttggtcgaaatccatccgcaggtcccatgcatccgagcttcgcagacatttgtaagatcattgtctaagatgtcgggaactttcaggtacttcttgagatttttgattctctcacgcctctgcttcagtttcagctccggaattgccgcggtaattttgttcacagtagaggcgagcgcgtttcggaggacggcatagttggggtctgcaggtgtgtcaaacttgcatatcgagcggtggtcagcagtcatgggtatctgctgctcttcacggtacccgaggacggccgactcgggatcgacgatgagtgagctaaacattttcatattctacgtttcgtagaacgaccagagctcaaggccggccgaaaaatgtcgaaatccgtcattgattacttggactgccccagaatttggttccagatcgccaacataagcacggtcgtatgcaaccttgaggaggttcttcagaatctttgccgaatcggcacctcgatgcggcgtggcgagaaaatagaatgcggcgaatcgcccagccagcgccttgtacacttcgtcttgtttagccaggatatatgctttctttatcactaagccacccttgctgtggccgatgacaacgatgtgtgttccagaattgagaatgcatggcgaagtgctgatcgcacctaggaatgacttgctaatgtggtgtatattcaagcagtcctcttttcctttcaagtagtacgaatcgtatccatagctatgaatgcggacgttcttgaatgcgggatctttggagagccactcccttggccagaaattataccgcagagacgatttggtccatgtttttctagaattaccgcctaggccatggacgaagatgaagtcgatctccggtgccgtcggggaatataggagactcagtccaagagggccttttacgctctccgcttgaccgtccgatgtgtttgacgtcctgggcagggcctttgacagagaaaacaggctcctcgagctcttagtcgagtcgcgactacttgagggactgtcgggatatagttcgggctttgcgtgccgctgctttcgaaagaactggtacagtcagcgatctggtaagagggaagtttcccaggaggccaaggaggtgagagtcaaccattgtagaccaaaaaatcccagtgcgtacggcgtcaatccggtcgctcggacttcaagaacggtctgccaatcaagagaataatagaataatggttcaatgggagttgtttcaggagagactcttggtaatgcccaacaccttggaattgaagcacgtaatatgtacctacccctccttcgaaccaccaatcagccagttgtcttaaccgctcgtcaacgacccccgccgactcgggaaagataacggtaggtatttacccagaaactcactccctttcacctctaactttgacatttcttgaggatgctgtgctgatttggcgcataaaagggattgttcacgcattgtatattatttcagagccatatactatgggttcaatgcatccaaccttcgcagttggggaccatgaggctttcatagaattcgctctcaggtacaaaaatcaccgccagctgcaaacaaattctgcgtcggagccatacttgtcgacggcgctaacggcaagatgctatcaacagggcactcgcttgaatacccgcgagattacaatgaagatctaggcaccacgcacgcagagcagtgttgtttcatcaagatcgccgatgaatacaaccttcccgaggaacgcatccacgaggtccttccggctaacacagtgctgtacacgaccatggagccatgcaacgaaagacttagcggcaatatgacctgcgcgaccaggatcttgaggcttaggagcgccatcaagacggtctacgttaaaatcaaagagccagggacatttattccgcacaatgatggacagcaaaggttggaggcaaacggggtcaaggtcgtgttccctgttgaacattggcatgataggatcatcaaggtctcaatgactggacattgaagactgagtttggagtagcgaagaaaggttgcggaaacacccggacggcccgagtcgccacgtggctctggacccttctttaccttctttgcttgtgtacagtgcttcgtcagtcttatttctgatttcttcgagattttataaatagatggtggcctagctggattgaatcaagtcatgctttaccccttcacgccgtcgctctcgcagacataggcagggggatactacaatgtagtcagcacagcgagatgcacatgtggatacacatacaagtggaactcgcaagcaagtggccaacacaactgagaatttcatacggagtacataaatgggagttgacccctcgggacgatagttatctggtgaagaggggaccctgtcacgggggacaggggcaccgacagccctgccagcgaaacaggtgtgagagcaaagtcgctcactgggaataataaggtaaaagagaggagagcaccaggggtggctactagaataatggaaagttgaaaggaggttgaaggtatctgcgtgcaataatttctacatcaggggtccttcatagttatcccgacctcgggaggttccgaggtcagcatagccgcttagtcatcctcgtcctctttcttctaaacagccttaactccgtgatccacatcgacaagcctaattggattctgccatcctcaactggcatgtggtggcagctcatcttcaaacctgttaagcaaagcgacaccctagtgcggatagccacaatgaccgaaagctcgactgttgaccaaatccccatctccgatgatgccgagcagaaggcggacaacgggtctgcattgagtgacccgatcgaacgtcgtcggcgacagaatcgcataaaccagagggctcaccgtacgtcactttcgctgcaatctattcaacagaggttaatctttgccgccaatatttgccaggagagcgcaagcgactgtcattaattaaaaacatccaccagaagagcctagtctcatcctcaagttcgacctctaacgtccaaacgcaagaccattcctcgcaagaccgttcttcgcaagacaatccgaaagtcaacttcaaccgcagctccgaatttctacacaacactctggagaaattcgccaagtcagcgtatgagagttacatacgcggggacccgagcactgatcatcttatgaccttgactaaggttaacgtctttcgaggattcatgcaaaatttgcgattagttggttggtcggagtactggatcgaccttgatgtcatttcgccgttcagtatagcttcgccacaaacgccccctcacatggacgataacagcctccttccgatcagcctgcagcccactcgaatccagaaatcgatacaccatcacccgtggttggacttatttcccttacctaagatgcgcgataatctcatcgaagccggggatgaatgggatgatgagcagctctgtcacgatatcatggggttctggggcgattcaacgatggatgcagggctgctagtttggggagacccttggaacgtgcagaactgggaggtgaccgagggatttctgaagaagtggcaatgggttattcgaggatgccccgaattgatgaacgcgacaaatagttggcgtgcccgtcgaggggagagactaatattccgctatgtttgaatcaacataatttaaactgggaaccagctttagcaatttactgagcagactaatattaaggggaggggttgttgcattattgtaaactaggggctatctatcagaaagttgtatcgaagagcaagtctataaaataagggacgtgaagccaaacaccaaaagtaacccatgagaacatcagacgtcaagatcatgaaaatagtagtcatgtcacacataaccccgggggctggggacctcatatcggagacctcgggtgagtttgtacttaggtaacatgttctttctcctcctctttaggaattcgcacccaaatcaacgtgatgaatgccgcaaccacttcacatgcaagcccaaaccaccagatggcacggattcctttcaagccgatgtcgccatctggtccctggtcgacttgggtgccgatggcatctgcgaccgctgtcatgattgcggaactcaagttctgcattgtcactagcagactcccagcactgccttgataagagcgacggacattgctggtgatataaattgacgctgctgcaaaagagagatccggaccgaaggtaacgagggccacaccagggaaggacagtgcccagtatgacgtgtttggggtttgtgggaggaagaaaacgggccccaagccaaatgcaaccatcgcagtgaaatagatatagtgacccgggaccacgtgaagagttcgactcaccacccaggtcgcgagcaccccgacaatagcattggggagaaggtagagtgcaaccgtgagaggagtattttgctggattcgtaaccagaactgaaccgcatagaactgccaagcaccctggaagccaccgtagccgatgaagtaggcaatcattaatggtgtaaagcctttcgtcttccagagcccattgggaatcagaggtcgctccacccagtgttcgatgaagaaaaacgcgataatcagaacaacgccgactgcaatcaaggcgtacgtgtagggcggccacattttcacagcgccttgagtcaacccgaacagcacacagatacagccgattgcaatgaagccagcgccaaggaaatcgaattggcgaatgcttggtacatcggctccgacaatgtcagcaactggaaggagagagggcatggtaaaccaggctgcaagaagacatagagcacagataatagcattggaaccgaagatccagtacagataagatttcagagcaccgccctgaatcccacctaaccaaaatccaaagggcgaggttgctgacattgcagaaaagactcgattcttccgaaggcctggcttgtatacgcgaccaaggatgctcatggacccagaaaccaatacccccacggagatcccctgcattgcacgtacaacatagaacagaatcgccgtcttggggtggattgagaagacacccacaatgttccaaatagttagccaaacgaaagccccgatcattaaggacctcggaggtgtcaagtcactcaatgagccggatatgaccacagagagactaagtggaagtgtgaaagaaccgagtagccagggaagctcgctgttgcgaattccaagagctcctttgaactcttcttgggtgactgtgatatcggcgaggaaaaacgaaaacagtagcaggccagccgaacaaacaagaacgaaaatcacctctgccgttaagctaccgagttcaggaggaacaccctgggactttgactcagatggagagccagcttcctcttgtagatcgggcaaccgagacgaacggcgcgttccgattcgttccatgcgggtagagggcacagtattgagttgatagtcgtcatccccatgtcggtcagtgatggaaagtgtccgcgatagattttccagagcttctcccatgtgcgagtcccttcgggttctcgtagtaggcactgtgtacaattcggggacatcttgagactcctcggggtgagaggagacggatctccgcctggtcgtctcatgagttgttgctggcgtgagactcgaactgaaagttcccaatttgtcttcttcaacgcgaaagcctttcttgacgctagcattatcggaatctagatgtgtcgatggcatattgtctcagacactcggattcgagcgtcttcatatatgactgtcgaggtatgggagacaaacaaaaggagcaatttgaaaaaagatcggaggggtatttttttctggtgaattgtcaatttgtgtgtggggacggggacgtccaacgtgattagcagcgaatttaaggtggtggaatgcggaaaccagaatccgtgagcagaagactattgatcgaaattttcaccaggctcaggtgatttgatatgtttggagggctggccctcgacaactcttaggcgagcgtggcctccaaaactttcgggcgattttgatgatcgggacgctttgggcgggcgcgaaggcacatattttgttggactggtctgatatcatcgagaacttgttgagaaacattcgaaatgcttcccaatatccatttttaaatggaacttgaagctgggggactgtgaaaacaatcgagtgacgtcttttgatctgataaattaagcatacagtattgccgcgtttagccgtttaccagattcatgtttttatatcatccccggctggcgtaagcgcggggataaactacattaggatacaaggataatgtttttttattcaacccctatgaatttgttgaatcgatatactcatattccaatgctcggtagctgcctggttctactgacatttaatcagtgctgttattgttgtgggtgatgacattcacattaaattagttgaggtgccgtgacaaaaatattttgcgcaagctcatgccttcaattacagtttctcctttcttccccatagctccaaccattctttaaccgaagcaccagatctaaccagctcattcatgcatatattgcgcacatagtcacatcgaattaccttcatggcgttacggacattgtggggtgagggagattccagggccttggccacccaatggccgtcatgtgcgtctaatgctagcacgataggatacgtcatctcgcggttgtgcaagtcttcggctgtagagcctttcagctttgcatactccgaagaataaacatttttacagtcattttggagctgcgaatgccagctatataaacgtcaaacctaaatcctagcatgtatctctaggaagggaccgacttacgcaaccgtagttaaagtttcatccatggaatcattctctaggacaaggtggcctagtaaacggaataatgaaccggtcttgagagaggccattcttcgatatgccgcaattctgtccgcagtggcagtagggaacgcacggattccatccctgcgccaaactagggatatatcttgaccttcaaggatatcctggagatcctgcatcagccatggggcgagattggggaagtccttcgttgttttgttgagaatctgggtgactctgtagtaggcgcggtttgctgtttcggatgggccgtatatattgtgagcagtgggtcgtcctttgcggtaatcgcttccgtcggagatctaagaaaatctctgtcagatggtttatcttaagccatatcaaagaaagtgggaagagggctttaggcactcacatcatcaaccagcattaggcagaggtgtatagcatccataatctccaacaccatccggtacttaggaggatcatcattatgaagggagggggatagcttgtgaacaaacgctatccaatgatgcttgccgtagacttcacgaagatattcataagggcattcaagtttagtaattctcttgggattctttcgtccgaccaggtgggcttttttgtcccaccaccgagggatgtgaatatgatcaacaattagatataggaagccgctcacaacaaccatacccaggacagggctgatccgaagaaaaaaattgaacaggctttcaaatagactcataatgtaaaatggatatgaatcgacttgcaataacgaagagagcaggatatgtgaaagaataatcaacgttcaaacatctatacttcgaagaattccttaaatgctagtcctcctgcccagaaaagtaacaagcaaaatgctagattcacaactgacgtcgcattctctgcacatactctggtgttatctcgtttacgcataccagatatatcttagtcgacggcgagtctatgagatttctgcaggtcaacttcaaacatagcgagtagaaacgaagaattactgtttccggggttccgaaatgttgcatatatacctgtggcaacttttccctgtctaaatatgcatgtaggagttgcattagggtgaaacggggtttattttcgcattttgcagggaatatgaacacctgcattatacaatatgattgtatatcccgattgcgataatgcaccgcaaacattgaaattgctttttgagtaatatacgttattcagatccttcaaatgtaggtcagatctacggtcattttcatcataatactgcctcatattctgccctactaagcacagaagaaatacatgtaattgagagcaggatgacaggggtttctttatcttacacggggagttaattaataaataatggcaacgctaaatgataccatggaccgagaatcccgtcatgcacacttatgacttacgcaggtggcatttgagggctgacattttctatcttattcatgtatatgtgttagttgcaattaaatttgaactcatgcataatcacccagttttgaataacagggctcggagaacgcgctcatcaaggaagctgtcacggtatctctacctatgctgaacctatatataggcgttgatttgaggggccttgattccgcactcagaattatttgattctttctttttgatctgcaaaattgccacaatggacggattcgacccctcccaagctccgatagagtaccaagctgtgaagcctctcgccgatttattcctcctcggagctgcacttgggtgggtgaccaattatgtcgggatggtctacacgtcgttcaatgaagagacctatgcaatgtcaattttggcactttgttgcaactttgcatgggagattgtctataccttgatttatccctccaaaaatcggcttgaacgaggagtattattcctagcgatgatcatcaactttggcattatgtatgccgcagtcatcttctcgccacgagaatggacccacgcgccactggtcgagcagaacctccattggatcttctccatcggaatcatcggattcctcactgggcacctcgctctcgctgcagaaatcggcgctgcgttggcgtacacctggggcgcggttgtggcccagctgctgctaagcgttggcggtatctgtcagcttctctgtcgtggaagtacccgtggtgcttcctacgctctatggtatgcagtcccacattttagatatgtctttcatataatattattgtctgaaagagtatcgataatcgattgaaaagcttacgctgacatattttaggttttcccgcttctttggatcgtgcagcgcgatggggttcgcagttctgcgttggatgtattggccggaatcatttgcatggcttagcagtccccttatactgtggagtgtggctgtcttcctaatcgttgatggcttttatgggctatgttactggtatgttaagcggtatgaaaagagttttggtacggcacgaacagaaaaggtcaaatgatctgtgaagaatgaggacagtatcatatcgatggctacattattggaagaaaatctgcagaagataagatattgaaacgaatgaattgcttttgtttgaatatctcacaatgtcacagtactatactgtggataatgctgcagtaagatatgtatcgttcaatatatgtagccctcttcaaaatgccatcaggtaaatttcaaagatatcctacccggcctcccatctacgtagacaggagagagtctcaagaatacgcacaggaaacccttcgtgttccatatctatccaagtcagtggtatttatttcgagtaagtaacaggagtctacctcagcaggtgccctctgtctaaataccagaatgagcaagtcagagttccaagtaatcattgtcggcggatcaatcggaggcttgactctggcacattgcctacaacgcgccgggattgaccatgttgtccttgagaaagcgggcaatccagcaccccaaattggggcatcgatcggcattttcccaaatggagctctcattcttgatcaactccaactgtatgagttggtcgagaaacacattgagcatctgagcatagcaaccatccgctatcccgacggttacagctttcaaagctcttttcccaaggtcctaagtgaaaggttagtcttagttcctcccattattcccgtggaagtatctttaaaagtatctttatggttctgatggcactgcacaggttcggttacccgatcgcattcctagatcgacagaagatgcttgaaatcctctaccacggctacccagatcatcagaaaatctgcctggacgaaagagtgacaaaaattgaaccttgtggtgatacggttatagtgagcacgggcaacggctctgtctatcgagggcaccttgtcgtcggcgcagatggcgtccacagcaaagttcggcaggaaatctggaacgcggttgagaaggctggctcgggagcggcaattgagagattcggtaagtaacaatgagctgtattattctctgatttatatgggaactgaacgctgcacaggtctcacggcggaatttcgctgcatcttcggcatctcctcccccatccaaggattgattataggagagcaggtgaatgcattatttgatggtttgaccatcattacgatccatggaaaaaatgggcgcgtgtattggttcgtcatacagaagttggatcagaaatatacttacccgaactgccctcgctacatgacaggcgacattgaaattgcagcagaggaactgagaagtatagtattctacaaagacctcgagtttgggcaactgtgggagaatcgtgagacagcctccatgaccgtcttggaggaacacatctttgaaacctggcatcatgaccggctagttcttctgggcgacagtgctcacaagataactcctaatatcggacagggcgccaatatggcaatagaggatgccgcagctctggcaaatctactgcaaagattacggaagggctcgggaagttggcctcccacagatggacaggtggaggctcttttgaatcaatatcgcaatattcgccatggccgcgtcaagtcagtctacaaaagctcccgctttttggtccgcctacatgctcgagatagcttacttaagactcttcttggtcgatactgtgtaccatatgccggcgacttgccggcgtatatcggatccaaatctattgccgacggggtgatgtgtgatttcctgcctcccccaaagcgtggtggaggcgggtgggagagatatcggactaaggacttgaattgggggtggattcaagctaccttgtatatcatcatctttactgttctgtatacatctatcaaccggtattggggtatggcggtcgagataaattgattttgatagggtatagcagaactacccgcaggcggtagagcacaataagccaataagatagcacgaaggcggtgtatgtaacgactatccttggaaccttagaactcagttcaaaaaaaatgaagctattcccaccatacaaatctccgcatacaccgaattctaggcgttgaagcaattgcgaccgtataagtgatttgtggggtggggatagctttaattcaatggtttatatagtcggggatagtttttagcgctagggattcgaagaaattgatgttttgtcgggtgggaataacttcaatttacagtacacgggagagcggtgtcgaaggcggtctaaaattcaggcatattcaggcaccaaccccgcaaaactaggcagaaaccacagtctcccacttaaagcacgtgaaatctccacccaaccggtggagataagatagactatcagtcatgtgatttgggtgggccaccagttgggtgaactgccccctgtcgcggtttgctgcgggccacaatcgttgcgccatcctcagctgaagatcgcatgatatgggcctacatcttccgcgtcataatccacggtttaacatgtttcatgccgggaaccgcgtatcaagtacatcgaggtggtatgcacaaatccctcaagtgcccgacaaagaatcagcttcttttctgtatagagaacatccatcgatcgcatatgccaggccagtttgctaggatcatggggcgatcggaccgtacggggatgcctagcgttgatggtgacacgggtcatgctccataaggatgtggatagacattatgaaattaactgcattatattgcttggacttgtcagactatctaaactgtgcggggaggtctgagatctatttggggcgcatattgacgaataatttcaggtgatatcgtcgaagtttcatggcattctacgtgttgtgcgcgtttacccgggcgaaaatatatcgatatggttccggtattagcaatcccaaggatgttggacctgatatgcatctaatatgcatgctcacatgcatgctcctccatattcattaggatgagatccacaattgatcgtacgtccgattcggtccgcttcgccggaactgattctcgtttgatgagtggttcctttaagattcctcgtctctgtacctcctcagtcgtgttataaatcatgaccaccattatgatttcccatcggagatccatgcggttctttctcgagtttgcatttatcgcatagggatgtctacatcttgcttcttggctgcacttggccccacgcctccagtcatgcacctgaattttgcatgaagcctccaagagagcagaagttctccgaccttccggggagcctgtactgacgtatgacgtaaaagagagtttgtgatatgaagggttgattttctcgcaaaaaaggcgaagggttgtttagaactttcttgaaagacattgaatggaaacatgctcggcctaacaacagcaaagatattcgcttttatttcctattttctttccccgataacattcttcaccaataataaagcggcttcgacatatcaccataggaggccggatctccgaagcttccaaatacgccacgcccagacaaatcatacacaacaaaagttccagtcaaatgatgaaagcgatagtggagctcgcgagatcaccgagccgtatgagaaggtatgatagggccttgcttctgaaaccgcattatctaacctccctaaacttcagattgtgtgcgctccattagaatacctgctctctattccagggaaagatatccggggcaaattgatatcagctttcaatgaatggctccatctgccggatgataaattggccattgtgaaagaagtgattgatcggctgcatacagcatcgctactgtgagttcaatcgggttgtactagaagccgcgctaaaacctatgcaggatagatgatattcaggacgcatctcatctccgtcggggacatcctgtggctcatgatgtctttggaatcgcccaaaccatcaatgcagccaactatgcatactttctacaacagaaaaggttgagtgagataaatgacccgcgcgcatttcctattttcactcaagcgctcttggatctgcacgtaggccaagggatggacctctactggcgtgacgcgctggtgtgccccacggaagcggaatacacccgtatggttatgtataaaaccggtggattgtttcgacttgcagtagaattgatgcaaattcaaagcactacaactacgtatgattagctcagtcgtacaatcccgaaactcttagctgacttgatctagggacctttcccgactcgtggagctattgggaatcatcttccagatccgggatgactatatgaatctgcagagcgggatttatgcaaagaaaaaaggattgatggaggacttaacagagggaaagttttcctatcctgtgattcatagcatccgtgcggttccaggcaacatgcaactcatcaatattctcaaacaacgcagtgaagacagagcagtcaaagtccgtgccgtgcagtacatggagtcaaccgggagttttcagtactgccgggaggtattgggagggttgatggagcaggcacgaagccatgttgacgagctggagatactcttggggcccaatcagggaattcgtcatattcttgatttacttgaggtctaaccaccagatgtgaatccaggtccatgagtccatgagtccatagttacatcctaaatgaacgcatggggtttttttcccaatcggcgatggtgaaccatggatattgctcatctattagcttacttgtatatccccatcatacagagctcgaagtccttttcgccgaactacctccagagctgcttgtacccacgcaatttcatgaccatgaccagcccgattccgtagactatcaagcacagtcccaagcgcgggactaacaggtaatgggccggctagcagcatgccatctttcagaaattattccacagattggcaaactcgatgtgccatagataagtagtctccacaaaggtcaatgggatttgatgtactcatcacttccgaagcagaaccttgatctaactcggtctcaagagccacccagctgaacttctcaaggtttgtgatcctttccaagtgctggtacatattggaaagactcgaccagagcatcgttcgcgttgcccataggagtatcagcgtagcagcgatctgggcgttttggaaacagagaacgactgggaacagattgctatcaggcgggatattacgggatatgcataatgtcaatactcgtacacggccatgatccgcacaacctatcaactacatattcacatagaaagcgacattggaatgaaagaaagtcgtattgctcatcttcgcaagcggagatatcgtttctttgtattttccccgcatttttgtgatcacgaaaccatttccggatctccacatgttaccaggaatcccttaccgagcattccgaaattccgagcatgtacgtactggtataagttggctgggagctgcaggtccccgggaaaaattaataaaaccctaacttcccttgtcatgtctcactctcatccacttagtattctctccatcgaggagaccaatttggcccgtgatgtggtcaaagctgctcacccaaacgtcgtgatcgactttcgggagatcttcctacaagaaccacccaaagctcagctccaggaatttctagctcttgaacatgccggccgcttaagcccaactaccccacggcctccacgtctcgctctatgccaatatgacgtgatcggggtggaccgcattcctcagttccacgaatctgtgatcgacgtggtttcacagtcacgagtgaaacacacggtggtggggagggaacatcatgccagtttgactctgtaagaaataattatagttgaacatccggagttttctaacagttgactaggagcgaatttgatgttctcgtcgataaatgcatgacatcaccattgttccagaaagcattgtcggaattcgatctccctgaagggttcgaggtcgtgattgagccatggccatatggtggcttggatcatacagatgaaaatcgtcgttttttccagggcctttgtttcgcccaggataaacgttctggcaatgaagactccaatttctattcgttccccttgcccattatccctgtgatggatgcccacacccaaaagatcacccgggtagatcgacccgccacaggcggcaatggtgatggtctacttgaacagactttcaagcgggatataattggtcattgcaagtcctccgaatacgtgccagagctgttgcccgaggggacccgcaaggatctcaaaccactgaatgtggtccagcctgagggtccgtccttccgagtcaccaacgagtctctggttgaatggcagaagtggcggtttcgtgttgcttttaatccgcgagagggtgcgaccattcacgatgtctcgtatgatggtcgtagcgtgatgcaccggctggcaatcagcgaaatggtaaattatatgctatcccaaacatatagctgggaactaattgtgcttcgcttgcttagaccgttccgtatgccgaccctcgaccccctttccatcggaaacaggcctttgactttggcgatggcggcggcggaaacatggctaacaacctctcactgggctgtgactgtctcggggtcattaaatatttcgacgccattgtcacccgggaagacggcaccgcccaaacccttccgaatgtgatttgtctccacgaacaggacaatggaattggatggaagcattccaactggcgtaccgggcgcgctgtcgtcacgcggaaccgggagcttgttgtccagtttattatcacactggccaactatgaatatatctttgcctataaattcgatcagtcgggtgggatcacagtcgaggcacgcgcaacaggtatattgaacgtggtcaatatcgacgctggtaaggtcagtgaatatggaaatgtggtgagcggtggtgttctcgctcagaaccaccagcacattttcaatatacgaatggatccagctatcgacggccccaacaactcagtggtcgtagaggaatctcactcagttccaatgaatgcggtgaccaaccccaatgggaacttctataaagtcaccaagcagaccatggagcgtgcatcttggatcgatgccgctccgcagctcaatcggaccatcaagatgatcaatccccacataacgaatcctatcagtggaaaccccgtgggatacaaattcattccactagccactcagactctattggccgatcctgcatcggtgcaggcgcgccgggctcaatttgctcaacaccacgtttgggtcacgaagtaccgcgacggggagctctatgctggaggtcgttatactttgcagagccaaacagaagtcgaaggtgtctctgatgctgtccttcgaggtgactctgttgttgacaccgacgtggtggtttggcactcctttggcattacccacaatcctcgtgtggaagattggcccgtgatgtatgttgatcgcatttttcttcttttcattctttcttcttcttttcattctaactcaataggcccgtcgagattttccagctcatgatccggcctgcggacttttttgtcgccaacccatcgctcgatgttccttccaacaagaatatatcgtcacgtctagctgactcggaatgctgtcgaaagtcgcatatttagctattatttaaaaagaaggacatagagatagagagagttttccctgattcgtgtatttctgcatcggcccgccccgcaatacccacctgtaaacaacatcgtcacagtgattgacctttgcccttgcattatttatgtaaccacaaccacaccaatcgtgccaagcgcccaaaacacaatggtgcgcaccagtcaacgataattttcactcaatgataaattcacgaaatcaggtaccttttatatggtatactaatacaaatagtacctaaagtccaagaatcttaatatcctttttctccaccaccctactaaggtaggggaataggtcttaacacgataattaagacagctttagtttatttgacatctatacggaatatcaggtatacaaaataataggattttcaaatttctgtataatatacatcgtccttctaaatatatttatcaaacttctataggtattaattatttggctttaatttagtgctagaacgacttgaccatgaactattatatattagtactcctatttgtctcttaataaattcaagggttgataaaaatggaaattatgatttttggactttggtaccatttgtattagcatactacgcaggtgtatagcggccaacagtcggatgcctgattttagcataccatacataccggcccgaattttacactgctgtagacatggttcgtcgctcagcaacccatgcccgtacttcccgaagattgcaaaaagttcttcacagtttgaaacggatttgattgaacctcaggtgggatagcgaagctggccgacaatcatctactcatcgaggtattcatcccccaaagacagattccaaggatgagaaagagacatctgagcttcatgcgcatgctgcgtctcaaagtaagttgtactcatcccacggtatttgggatccaacgccgatatcaaccacaacggagtctgctgctgcacgtacttccagccttcgtcaaatatctgaggctgctactcctcagctctcatctaacactttctggccaatgtcacctggtacagtggctggatctgaatctgaagtctgtgaagacctcagcagcttttttgaaatagccggtgaattctactttgaccctcaacctggatcgaatattgccgccggtgcagatgtgggattggcctccagatgacacgcgttcgcccaatgcgctgaacgcctttcatgccgaagatgaagcattgacgagagtcatggctggtttgctgtgaacattgtggaccttgttatgcataacggttcaataaattaagctatgagttcaacgatgagcgacttcggttcggttaaatacattgctatactcgaaattatgaaacatccctcgggtatttgcacttccgtttatccgtcacgaaatgactgttgtttcgaattgggattccccggaacttggcgtgcctttgcctatagttttcggcaattccaccagtcgctctaattcccacgactagttaatttccggaaggattttcttctttccgctttagactcttaccctcaggagcctagtatatttcccctctcttgtgtgttgtatccagactatcggatatgctagctgcagaagaagatctcacccgccggtgggggaaaacctcggatttccacgaatgatgcgtgccctcgccaaatactgtatacaaatatgtccaggcaagcccattaatgaagttttattgctcttcattcaacatacaaatcatctccctcgatgcattttggtaatatcatcaagccagtgcttttcgcggccctcgtgcacggatatgcaaaccctggcagttgttcaggggcgtgcaatgtgcacgacccgtcgttgatacaaagatcatcggacagtcgttatttccgattttccactggcaacaaaatttcttatgccagcgcctcatctatcaacggcccatggactacgattgggtccatcctgcctagtgggtcttctatcgatctcgccggaaatgatgacctatgggtaagcattaccctttccgcaaagcttgtccgcaagtgatcaacatattgggtactgacttccatgctaggctcccgatgcgcagcttgtgaatggtctttactatgtttattactctgtgtcgacgtttggttcacagaattcagcccttggactagccacatctgcaaccatggatttgggctcctggactgaccatggagcaactggtattgcttcgtcatctgccaaggcatataatgctattgatggcaatttgttcaatgctggtggtacttactatatgaatttcggctccttttggcacgatatctaccaggctccaatgaactcggatgccactaaagtcgcgtcttcgtcctacaatctggcttatgactcctctggaacacacgctgtggaggggtcctacatgtataagtatggaaactactactatctcttttactctgccggcatctgttgtggctacgacacatctcgccctgccagcggagcagaatacaagatcaaggtctgccgatcgacctcgcctactagcggatttgtatgttacccaatttcccgctttagacactcgccctaactcttttcctatccaaggttgatgcatcgggcactgcttgcacaagcgggggaggcacagttgttctagaaagccacgggacagtctatggtcctggtggacagtaagtttttgatttcgatcgtattccaaactcgaatattaacctgaccttgctccaggggcgtgtttaccgatcctagcctcggcccagtgctatactaccactatgttgacactactgtaggctatgccgatagtcagaaactctttgggtggaatcagatcgatttctcaagcggatggccagtggtttaagtgtgttggtgcctggtttttcaggccaggtactgttcttcccctttccttcctcttcctctctttgttctttctcctccagtcctctattagcttggaatacgatcgatgggttgactgggcttcttgctttctttcgtgggtaaagtagctttgcttggtttggtacatttgcaaccaaatgcgattgatgtaagtagtacagcattctaccactaaaccatagcgaacaacgggtatctgtttatcacatagggtgtatgctatcatggatttctcaatttgagataattcgttctaaaactgaagtttctaattcaaaaaaagcttacagtatgacacatcccggcgattttcgcactcggccgactggttctgccccaaggggttgccaacaaaatgagtctaaatttcctctcctcaagattattcgaagtattttttgaacttcataaatttcatttgctatggaaaagtcatctaaattaccctgcgccaaaacccaggtgaagtataacgcgggatggagacgcatcgtgcgaaatttcagtccgtcgtatggtctctcccccttcaaaaacgttaccggtttatgctgacagaaatatatagatggttcgcggtaactatgggcactggcattgtttcggtgttgatggtatcgatccctttcgatactccagtgctctattacttgtcgatcgtcttcttcctactcaatgcggtgttatttactctggctttcattacttccgtcctccgatacaccttatatcctgaaatatggcaggtgatgattcaagacccaaccaattcgctcttcttggggacaatcccgatgggcttcgctacactcattgagatgtgggtgttagtttgcgtgccaatctggggcgaatgggccaaaacatttgcatgggctttatggatgatcgacgtggtagcagcggcttctgtgacttcgtccctaaccttcattttgtaggtctacagtcctccacatgccaatttttaagatactgacatccgatcagaatgtctcagcgccatatcacctcgctagatcggttcactgcggtacaattattgccaatcgcagcgactattgtggcagcgggtaccggcgccgaggttgctcttatcttagcagacaagcaccatgcgatgggaacactcctcgcctcatttattctctggggtatgggcactccgatggccattgtggtattggtaatatactatcagcgactagcagtgcataagcttccaccgagggaactgattgtgagctgttttctaccactggggcctcttggctttggtgggttcgggtaagtgtcttgcagatttcccttgggcgccctaagactctgggctaatacgctgtcagcatcgtttacattgggaaggtagcacgggtattgtcgcaggattcccagttcctcgaccctatcgcaggccacattgcatatgtcttgggtgtcttcatatccctcctcatgtggagcttcggcttgatttggctcgtatttgccctagctaccgttctatacagctctccgtttcctttcaacatgggttggtggggatttacgttcccacttggggtgtattccgcaaacactatagagttgggccttgaaatggacatcatgttcttcaaagtcctcggtaccgtatgtccatcctgtttttttttcgttttccgctcttcaaataaatgataggtactaacttattatttgaagatcctcagtggcgcagtgttgctattatgggtgttggttgcatcgcgaactgtacacggagcatggcgcggaaccctattttatgctccatgcctacaaaacctggcaataaaggaagagggggctgagcgagatgaagatcggcatcgggcgtaagacgaaaacattggtgaagtctctcattaccaagcctccaaacactccaccaatagaacaatgcgtatgcccaggtctgatccccagatgtaatgtatcgcgccggagaaccccgctgacggggtcttctgtacctgctgtcgtggccagtgaaggggaagcctagaagtactccgtatagcttaggcaatttttgccgaactcgatatctcgattcattggtcggacctagggtgattaccttgattacccccaaatgtttacggggtacgatgtattcatccatgccaagcactacctatcaggcgagtagtcacatgttcagcccgtcagcttcgtgttgttcgctttttccactctcttcttggattatggtcttttgtgataccggaggccgttttcttgactctttgctattcaaataagtctttcacggtagcgcttgagtattgagaatggtaaggcttgggttctatctatacagatctatggccaagcacaactctaagtgaagtctaggatacgggggagtacgagtttcccttcttgcaggaggtcttctctcctcgtgaatcgcacaagatcgagtatgaatactagggccctatattttatacggaaattatttctaagacctgttctttagttttgtcttcgttcatggcctgaacccaagcggtcgcaatgaccatcctttccagacatggacgcatagcaatggcaagttttggccgagggacttcctggccgaggacataccctatgcgcgcgtcttcgtttacggatacaattcaagcatcacccatccacagaccatgtctacggctagcatcaaggaccatgcgaatacgctgttgaatttattggatatggaacgcggccctcagatggtaaatcgtgggacccaacaagcttcatttgaataatcaattaacgtatcacagggatctgttccaccgaaagtgatattcatcggacatagtttgggggggttagtgatcaaacaggtcagatatatatcccatgaccttttcctatggcatcttcctgacagtctatgaatcaacggtataggcactgctcaatgctaaagaagatccaaaatatacctctattcgttcggcaacttctggtctcgtcttcttcggtacacctcatcgtggagcgaaggctgtggaactagggaaaattgcagcccgggttgctcgctttgtctccaaaggccatgctagcaatgaccttctaaactgcctggaattcaattccctttttactcgacagatgaccgatcggttccgacatcaactggaagattatcgtgttgttagctttatcgaagggaaggaggtgcagatagggggagttggaccagcatctatcagccatgtaagcagattttccttcactaattatgtgttcccccggtccccgtatacttttgtcctggaagagtgactgatattgaaaagcttgtggttgatgaagagtctgcggttcttgggctgtctggtttacgcgaaacccaactcaagctcgacgcagatcactcgcagatgtgcaaggtgggctctcggggtccgatgtaccgtttgataaaaggcaatatcaaacaactggtcgatcaggcgcttctgtctgagcaaggctttattccaccatcgataccttcaagtaccgcgtcatccccaccgccagtcccaccacgccttcattcaaatagtagcacgccataccatgggcagagtcgcccatctccatcgacacaaagggtgacaggaatgattttcaacgctctggataatgacccacggtctgttcgctccgcagaactcaaaaatcgggctcgatgggacgaagcccgaaccgtcgaatatgggattttccaggagcatttgcgcagccttggtccggatcatttcagtacactatcagtggcatacaatttagctgaggtggaaatggagtctagctacttagataaagcaaatgaatggtgccattgggtgtccggaaatgcccaacgcgtctttgggacaaaacatcccctggcaatgaagacggaaagtttgactgcagaggtcttgtgtcaacaaggcaagtaccaagaggccgagtcggtctgcgccaacgtgttagcccgtcagcaaatgactatcggcgaagatcacctagacacctgacactcggcgccgattgggaatgacctacaatggactaggtcgccgggaaaatgccgttatgactgcggagaagctgacagacaccctaaagcgtcttcttggagaaacccacattcgtgtatttgtcattgcgttggatgctttggaatacatcgtgagcaaccattctgggaacgaaaatgccctaattgtgatgcgttttcaacccgatgtacaacaagcagtggggatatcgttacaggtctaccaagagcttcgtaatgccttgggtcatggacacccggctaccattcgcgctctctgtctccacggccgagcacaaaactttatgcagcagagtatagaggcctcagagacactgcgccgggctttggccagtgccgaagaaacgttaggacccgatcatccgctgacattagaaatcgtgggcaacattggcattatgtacgctgcgcaaaatagctatgctcaaggtttactcagcaacagtcccgctgcggaagccttcccctggctgatacgatatttgaactgggttgaacagcgcaaaggcaaaaacaaccccgaagcgcaagccactttggagcttctggccagtctacatttcaacgctagagagtacgaacccgcccagaattactatgagcgcctcgtggcgaatattcgcggggccgactcagcaatgaccgagcgcgtcaacactcggcttcaactgtgccgggcgaacaccatgtacacccgtcggggcctaggatcgggactaggagggtttttgtccagcttgcagcgatactgacgtggttttatgattattatacctggatatacaacttcgctttatgaattcaatgggatctttgtcattattcagtcgtattcagtgtgatacatctaagtatgctcatgatccgtgaagggacatcatttgccttttgaattttatacacgatgagtggatcagccgatcatcataaggcgtttaatgtgtcaacttgttggggatgctctttctgtatatgtaatcaatactgattccctccattatgatccgcatggaaatcatacctagccttatccaactgctcatggccggcattgctgagcttcttcgcagggtcaaacttgtcagcaccgatcttcttctccgtggtgtgaatacctattcttgttaacttgaagtcttaaggcgcgagaatagacatcgaagctcacccttatcaatgtattcttggcccttattgcctccgagcttgttagcgataccagagactttgtccattgtgaaagagtgatgattgtggtagaaaaattgtaacgggttactgtaaaagagtaaaaagcaactctagataatgaacgaccctttatagggatctatagagtcaattactatgtactacgcatttcgtattatgcttaactctgtctatgataatgattcgctttggcatagaacgctatcgtcattgccgcactcttaaatgtgaatttgcccccgcaggtctcagtatctagtcatctttattggcataccgcttccagataggctcagatctgaggtcatattgatgatctcgatcttgccatggtagatctagtccgttgtctaacggcgatattgcatatcgtgacgtcagcgagcaactatcagattatcaggcattagttgacaccctcattatgaggcattaaggcatacaggcaccaatagctatataccgaggagcccttgctttcacggcgcttctccgatctctcagttatacaaccggctatcaatattcttgttcaaccttgtgcggtattctttttacacccttcttgtatatttgttacaacgataagctcacacaaaaatgtcgcatagatggctctgcaatctatcaaccagactaacaacaatttcatcaaaagcatcatggagatattgaatattcggctgtgggcaacactcggtgcgagctaccccgaacctaattgcttccccgcgtttgatcaaagtcaaaacaaacccccatactatacagcagccaatgagacaacccaaacgtcagatgtcaggcaatttttccaagtgctattgacagagctccacttgatatgtctatttaatttcttaccccggaggttcttggtcaaaccctcggagatgtgccgatgcgccgaattagccaagtaggatgcgcgtgatccgatttctttataacctatggcctcctctaagaccccgggaggggagcgtttctcgtgttaaatatatacccggtcttacaagaaacaaagaaatgggaaatccagcagaggaatgggagaaacccgatagcaagggccttgccttcgaacaaaatgctctttaccatgcttatgcttctaaaagcccagaatggcatcgagatatgaccaagcgtctacttcacaaggttgactggcaccttttacccttccttattctcatgtatttgttaaactttctggacagaaagtaggtgaccctgtttacagcagctatacatgatcacgaatcctaatagcttcttttagcaatttatcacaggctcgcctaggtacacttgaagaagacctcgacatggaaggcaccgattacaatctcgccacaagtatcttattcatcggctatctactgatgcaactaccatccaatctactcctaacccgtgttcggccttcgctgtttctgggtattgcaatggctatctggtatgacatatttcaatgagaccgacaagcgttagaatgcttaatttatttcacaggggtgtgatatccgcttgccaggcagccgttcagtcatttcccggactcattgcgacgcggttcttccttggatttgtcgaggcgccttttttcccaggtgctgtcatgttaatgtgagttactataaataaaaaagaagtgtgtctgaggaggttctgacatttactttgtataggtcgagctggtatacacgacaggaggtaattcaatacgccctgtaaaatgacgaagcataaaatctaacttactcgcttagttgagtcatcgtattgcatggttctatgctggcagctcgttagccaatgctttcggtggtcttatcggggcaggtgtgctaggtaatcttgatggcgcgcatggcatcgccggatggagatggctattcatcatcgagggatgtatcacagtgggaatatccctgctcgcggcgtgagtcttttctgtgcttgatacgtacattattatgtctccagactgactctcagtagtatctttcttccaaattatccagcttcgactccctggttagacgaacaaaaacaagcatatgcgcagtggcgcctaatgcatgatgcaggagaagctgacgaggtcagctcaactagtatcaaagatgccctaggtctggtatttgcggacaagcgtatttaccttttcatcttgcttcagcatgtctcgctcctgtcgcaaaacttccaatacttcttcccgactattgtgcagaccctcggatatgggaaagtcgaaacccttctgatcaccgcgcctgtatggattgctacgttctttgtctcgctgctggtgacatggtcatctggtaaaaccaacgatcgcagcctacatatcatctgcttgatgatggtcagcatggtaggaggtgtgattgccactgctaccactaaccttggcgccaaattcttcgccatgttcctgtaagtcctatggttccgttatttttcgcatgtctaacagtaatcaggatgcccatgggagctgtgtctgcatatcaaatcatcatcgcctgggttgccaattccttcccccggccgctggttaaacgctctgcggcaatcgctattgcaaatatgattggaaataccgcttctatctatggtagttacatgtggccatcatcttcgggacctcgatacattccaggaggaagcgcgaccgctgcgatagcactctttgtggcgttggtcgctctagtcattcgcctggtgcatattcgcatgaacaaaaggctggatgagactgagtcatcacgagatattatttcgtccaatacaaacgatctagaaacccgggctgttgggttccggtatattctatgatcccgtatttggggtttgttcttacacactctaaaaagacatggaagacatataatggattggcaatttcaactataaagcacacataagtatataaaagtagatatagggctccttttaacgtccgaagagcggggttggcatccttcgattagaaccgtccacattcgccatcacagtccaatcaaaagagaccttggattgtttcctcttcgttttccactccgaaatcactacacttcatcttcaacttcctcttctcatttcaaaatggtatgatctatatcccaccgtgtgatcctttgaattaggctgattttgcaagtcgggttcatcatctttcacttcaatccctattctggatttctctcaagcgctatccccatctaaacccgccttcctagcaagccttcgcgacgccctagtgaatgttggctttttctatcttcgaaatgctccgatttcggaccaaacccaagatcggtttatagaaaaggccctaggtctttttgaactaccactagagaaaaagcttgaaatcgaaatggtcaatagtccgcactttttgggctactcaaggcttggtgcagaaattacggctttgaaacctgattatcgtgaacaattcgatgtaagcttgggctgtattgtttcttcggatatctatgaacacttttgtcagttcgcaaccgaactccctgcacctggtccagacgagcctttatacaggaatgtcgttggtcctaaccaggtaagatcttatatttggtctttgtgtccgtcaatgctcataaagaattctgccagtggccggatgaaacggcaatccccggatttcgggaatctctcgacacatatctgtctgaagtgagcaacctagcggagttgttcccaggattgattgcagaggccttagaccttccatcaactgcattcgatcaggtctttgatactccccagcaacacaaactgaagttgatcaaataccctcccccacctgcaactagcaatgaggattccggatttcaaggtgttggtcctcacaaagattccggattcctcacattccttttgcagggtacacctcaccatggcctcgaggtccaaaataaggctgggacatggatccccgcgccgccactcccgggaacgttggttattaacattggccgctccctggaggcgctgactgggggtatctgcacggcaacgactcatcgggtaagcttacggcaggagaacttccaagacaatgggagtaatctagggtctaggttttccttcccggttttccagggagtgagtctcgatctttctgccgagaagatctctttggatattccagctcatatccgtgccttggtggaaaatgacaaggtcaaatcagatgcagaggcaacttttaacgaaatattccgtgggtgcattggcgagggaaccttcattgctcgggtgaccagtcaccaagatgttgggcagcgatggtatccggaagtcttgatgaaagcattgaagggtcagaaggatttccttagctgattgctgatataatatctatgatatgtctcgagatgattgcatttgcatatgcctacctaggtgactctacgtagtgtttttcctctgccgggtggggctttcctatcttggctagctacagtgacacagcaaaagtcttagcaccccaaattctgccggtcaaatacccaccaattaaaaatgaggcagaacgagcggtatcacaaaatcagaaggcggtctattcaattaagaaggcggtagcagaaggggtgttcagacttttgctgcgtcactgtacctcaagtatagtaattgatggttggagtcgttgacgacagatcaaggcaattattctggctttcatcaccacgcagattctcgctatcaaaaacattcctgtttctcacagcatactgttcaactgtagctttcactaaaactcatgcagaatcacatttcataattatcgtcgttgacgctcaccaccgaggcaggtaccttcccctaagattttgtcgtgagctgtgccctttccttgcccacttcattcttccaactccctcgttcaaagcccgcaaatcacttgttgcccacagccatgacatccctgtttactgatgtcgccgaaagtgctattgggctccgcagaatgtcccaaagcggcgcggttgtccctgctcgtccttccctgctgcagggtctccccgctggatacgctgtgcgggttttttcccaactcgagcgactccaagccgacgcggggaggatcctacagttgctccaagaaaataaagatggaaaccagtggctcgttgtcctcggtctgtcgacatcaacaatccgaaaattggacgacgaccacagtagtctgggaggcgtggaataccgcttccagtgggaaggatctacaggcgtcatcaaggtggtcccatctcatacccacgacatgaccacagatcaggtcaccaggtccatcgacgacagactttctgcaatgagaatccgttccactaataggaagtgggctgcaacttccacctacaaacccacccccaccaaaggcaagcagggcgatcaagcttttattccaccatctcggtgcccttccccccagcgacccgcgggctggcccacctttgttatcgagactggtgtgtccgagtccctccctcgactccgggaagacgcgaagtggtggctcgccgcttcgagtggggatgtgcggatcgtactcgttatcagtatcaagaggaccagcgtctactttgaaaaatggcaattggctccatcgaatgctccgcgccctctcacccgggcctacatcgataccctacgccttcaaggcccccacataccccctctcttccagcagccagcaacgatccagcaagcatactctgcacacgaagttgaggtaacccccactgggattgaggggactcctatgattctcccgtttgctgcgttgtatgaccgagaccccggacgtggggaagttgatgttgtcctcgatcctcaagactttcgggacatcaccagtatcctattttaacacctgttagttttgctacatggttggttaactgtttacctcgtctccaccttgctgtgatgacaaatttgtaccacacaggtgcgttcccaacatgctaggcccatatcattatccacactacagggcctagtatcaatcttccttctccaatatcgccttccagttgtcacgctccgagccgagcttaatcagctgggacccttctttagctagttaactaactatggtatcaccatgaaccttttcagagatcacctgatctggcttacttgctcaatttactcgcttactgtgtgcattgtttacattagatagattgtttgctgaattgctaagcaagatatttgaagtttgcactgtttgcaaagggatagctatatcaaatatttggttagtgtacagctaactaaactccaacaagggttgcgagtcggcaaacgcgcgcgaccatgacctgatgcttttcacttcaagctcaatacaaccaacactaaagcgagccgggaaatactgtaaagaatggttcttcattgctagggatgaaacttcaggcactgtacggtgatttaacgttgagtcaatcatagcggagatggttagaacaaaatacatggccctttcattgccgattgaatatctcccatgcaccacaaagcctcaattttagacgaacgtgaaaattcgacagccagccaaccaaaaatatcgctccatagtaatggatagttattctgtggcggagcgattgtttctgtctgacatttgcggcatcgattgctgtctgatattcaaggccgctatgaactgtcggtgttccgtattgtgtaatgtatgggtctaatcaatggtattcgactctctgtattgcactattctggcaatttatactaccatgattacataaggaatattacagcattggtaggattaataaatcttccgatataccggcgtatctacgccgagatgaacgcgcggcggctggataacttcttcgtgatagattagacctcgccacggcccacgtagcccatgcgcgggcaggtcaatggttcagcccgcccgtaagccgcccatcaaccgcccatcagcgcacaatgttcccaaataggatgtatgaatcgctcattctcgatatcacagctcccatataaccatggcggtctgagttggtcaaaacttgagagaagatgtattgaaatgacgggttataacgctagagccctaccacacggtgacttgtcatgtggttttttgttaacacctcagcttagctttcagatccgcgggcgaagagtccagaagaatctcgcgtaaggcgcccgcgtttcattgcgtttttcggggattcttcttctgaactaagctgttcagggggggtctgagctcgacgacgctttcgcgtacctggtgacaatggctcatcgacgccttggtctagtagctgtttctcatgttctgcttcggcagacgaaagaaagtcacagagctccctcgatgagatatggatatcttgatcgagattggggtatttctgtgagatgctcttaggggcaaagtccctgagtgaaagctggagcgctggttgtttagaatcatcgactggaagtccagactccgttcgaaaaggctgcaaatcgtcggttagtgctaaaatttcttgggactgcggctgaaaaggaacgtaccatcatatcgatcacagcctttgcttcgagttccttcaccccatccacggttattttgtgcggtcgccaaatggatatagtcgcctttttagaccctctatattcaatattgagggcaatcacagcgttcacgctcgtattagtgtcgaggatgtaatcatctgctaagtccgcagcagctcgaactttttgtgaatagcacacttctatgataacaccgggatatttggcatattcgtgtataaatgatgcatctgggcatcgttcggaataagtctgctctgtatcatttatatcattcggcagccggattctggatgtcgataaatgtttggtctttctcgcaaaatcaccgaaggcttcatcactcttttgcaactctgtcaatcgattcaaaattttagagactacctcggcacaaaacaaatcatgtagaggactcggcattcggatagtaagacgggaccgtctggggtcgtaatcgagcctataatacaactcaacaaacatgccttcaatgcgcctgaagatggacagtacttaccgtattttgtcttctacgtaacctcgaagagattcgtcaccatccagtacacgtaaaacctccgtatattggtccggagtgagccggtgttgccaccaagattgtggccgtcgacctttacggtggagtttgaaatagttcagcacgctttgtgcactagtcgacaacttcttctcttctgagggcgggggtgtagggggagtattcacaaaactcccagttggtgtggttttcttctccatgaggtctgattctgattcaggcgacatccttggggtacggtttgtttatgtcgcagagaaggggctaagcgccggatgagttgaggtgtcacgtgatgacgtggttgcagggatgtcgtgtacaacgtaaccgccttggagggcccctattaggtgtgtcccaccagtgcgatgaggtccacccaggcgtcgagcaggcctatcgagttggttctgggggagaagtgcaagtgtcaaggcgtaaacaacctcgtcagtgattttaggctcaatgttgagctgaatggtcagtgcggtggctggagcctgacactgttgttttcttttttctcgatctttctatcgacttcgacgtgccacgacactcattaattagcttcaaatgatgtttctcaattcccaaatggccagttcatatatcattgagccctcatgtttggatgctctttcgaaccccaaataatgatgttaagcaaaaaggcgacccatcgaggttacataatggtcaggtgatgctcagtgaagtggacgtgtttgatgattatgtaatgcccaggggcgtgctcagttctactcagtgagcaaaaagcggcaaggactgagcactaaaacggaaagggaaagccaagaagtggtagaggaaatctactactccgtacataggctgggattagatgacctccggagattggtgagaggaatggggatcgggatattgagcaagagtgagactctcagtggctgtaaatttaagaccttgagagaatatatattctgtcacaaatgagggaaatgtaaggagaaccttggaagttcattcaagatcgtgatcaaaggggccaatgcccaaatgtcttggcggatctccaattcccatttctctccacatctctcttcttctctccacacctcctcttatccaagatgccacgcgccgtccgaggtcagctccttttgttttctgcttttaagatctcttgctaacattttgtgtccttggtaggtctgctgatcgaatgcgatccctcgatcaagtcaatgatcctgaagtacgacgaagagcgacatgactacatagtggaggatttggatgacgagaaccacctggtcatcaaagagagccagttgcagaacctcaaggttcgcctagatcaggtacctactgcaccctagctattgccgggctatccgaggactgttactcatagactcgccaggaccttgacgaaaagatcatgcagctggatgaatccggatccgaataaggctgtaaccaggtatttctcaatgaagacgaggcctacacacgcgacgcagaggcaaccggtcaccatatccaagtccataacgcacccgccaaacaccatctcccaccgcttgttacgaaagatcgcatcatgacttcacccgtttacaatggttgaatgcagtccgaccgcccctctcaatcacccgccctttctccgaccgataaggcttggccactgtcaatgatagtgtgggggctgttttcaggcagcgcaagagaggtcggagattgtgcaactcatcgaggcttgtcatacttcacggtgctgtacatcccagctccgggccgtgctggctagtaatactcttgcaatgaatggaggcgtgtggcgtgatcgaatgttagcgaagcacatcatccaaaccatcggagaaacccttactccgacaggcataaccatggaccccgtatatagtgtagatgtcactatctagtgccacattctgctacacactcattggcacattggcacatacactgtaatcagtcaattacgtcttattgcataagacaacagtcgcgaccgtcgactgatgtcaacaccggttacacggcaatgctagagacagcgtctttgtgttccttttctgtgtaagggcacctggtttcgagtgcatcatggctatataagtcccttatgaacgcccgggacatccagcttccctctcatgagacataacccgcaaatatcagcttcaatataaaatcacgtctttcaagtcacccaacttccaactcacaacatgtctgttctccgtaccaacttccccggctctggcgacttcgcccccctcttccgtcttctggacgactacgatgaccaccgctctgcccgcaaccaggctgcagttcgctcgttctctcctcgcttcgacgtccgtgagagtgaaggggcatatcacttcgatggtgaactgcctggcatctctcaaaaggacatcgatattgagttctccgacccccagactctggttgtcaagggccgcactgaacgcgactacgaagacgtcgagccgccagaggaaaaggaaggctctaaggacgacgaaaccaagtccactcaccggttctgggctagcgagcgctcggtcggatcgttccagcgcgtcttcaccttcccgactcctgtcgaccagcacaatgtcaaggccagcctgaagaacggcattctttccatcaacgtgcccaagtccactgctgcttcttccaagaagatcaccattgagtgaacagtcacacccgtcacataaacgagccagaactatctttggcaatcgtattgcatgggaatcggacttaattggtctggggctattcaactcagaatgtattagtctatcttgattcaaattccatattgttctattttttttttggatattccttatgctccggggcctcggcacatgcaaatcctatgatacgcaaaatgcaatattaagataaaacagaattgaatcactttgatcacatcaactacttcaacaactacttcaactgcttcttcaaatacacgtttttgtctgatcaaaggtcgggttttctgactagatcaaagtagaagtagaattagaatcaagcctagcagaattaaattaatgccttatgttcaatggcaataaggtcttgactcgtgaagcagacgttactgtgacatcatcataacacttccattcaggaacagaataataataagactcaatgatcatactcctcaaagaccacagttttactaaaacagaaaatgtatgagtatcaaagcgagggtattgtgtcggaggaaggtgccaatccgttcctcgagcaccttccctttgatacgcccgtctacagttacgatcgacagtgcgctatagagagtctcttccctccatgttcaggttcagtcgaggatcgcttcgtcgttttgaaaaatttccctccagacgcattctcccagcacgaagaattaccgcggctttgcgattattcgccattatttcggatccttatcatcaaaatgccgggtggaccacatgaagacgcggccctccaatttaactacttgattatgacactcgccgagaatatgagcgtccgcagactggtcaggccgtggggatccaccagagtcgataccccggaccggcgaaaacaggcagacagcggatgggggccaagagggccaccgagacaattcccaaccgtagccctcgaagttggcttcaccgagaccacagcaaaattagagaacgatatcgcctggtggatcaacgggtcagatggtgatgtgacaatgggaatcactgtcgatatcaaaggttcgggctctattgaaatcaaaacctggaccccaggttctgagccgccatcccacccgaactacaccacagcaagcggtcgccatgtggtcgaccaaggtacttatgatccgcctccacctcgagtcgccgagagggtcctccttaagagggggcgtaatggcgctccttctacaacggaagggaacggtataaccataccattccgtgatttgctgttgtccgaaccaggacaaggcgagagcgatttcgtcctgacctcccaaatgttacttgaagaggtgggagaacccgtttgggatacaatggaccaggtcgagcggaccaaggcctcgaagagaagttaggatggttgtcacgttttgccgaggtcccccgctgtgtaatcacagccctttgatactccgtggctctctttctctccctcaaaccaaactccaaaaaaacattcatcgttctccctcgaaacatggctgaaaactactctttcaaatatttcaccgttaaatttcccaccgaccatcaatatgtggcccacgtggaaatcaaccgtccggaaaggttgaacgccttcatcgaagtgtaagcgctagttcccccagacttactgtacatatctttaacaaatcaaaatcagtatgtgggaaaacatggccaagatcttcaataaactttcctcagaccctcacgtgcgcgcagtcgttctcagcggcgctggagcgaaggcattcaccacagggctggacgtcaaagcagcctcggagggtctcctatcatcagacgacaccaagaccgacccagcccgaaaggcagtcgcgttccgtcgccacatcagcgccttccaggactgcatcacggcagtagagcgctgtgaaaagcccgtcgtggttgctctccacgggttctcattgggactcggtattgacctatccacggcgactgacgtgcgtctctgcgcccaggatacccggttcggcgtcaaagaagtcgatatcgggctcgcggcagacatcggtacgctcagccgtctgcccaaggtggtcgggaattacggatgggtcaaggaggtggcgctgacggcgcgcgagttcggcgctgaggaggcgctccgtgtgggcttcgttaatgcggtgtatgatacccgtgaagctactatcgtggctgcgttgaagctcgcatccctcattgctagcaagagccctgtcgctgtgcaaggtactaaggagatcttgaactattcgcgcgaccactctgtgcaggatggactgcgctacacgagtgtgtggaatagcgctgctttgcagacgcaggatgtctcggcggctttgctgtctgggttgcaaaagcgtactccgacattcgagaagttgtagtgacaaattcacccatgcccactgtatataaggtcaaaacatctagtctgctaatattgaatgtcatcattttttacagaaactcaaaacccccgtgcgtttgccaaggaatgccaatatcatcacatttgacgtgacacatacggagttatcccgtacacatgaaactgtttcagggtaaatttccggcattttatccaaaagccttgttatttcaagtccgtgtctgagtttccatgaatcagaagcatcgatcaactggtcgatcaacgggtctccgcattccagccctccccttttctccgaagtaaaactcgagagcccactgaggatgtcactttttccacgtatccaagccattgctgaacatggcaaaatgtataatttcgaagaaactgccaattctatagagaaaattcagtctgactttccttttcactaaaaaattcgccctattcctctcgccatgaaatctgctattcttctctccgcgttcatccctagtgcgctgggtgcgaccatctacctcgctggtgactcaactatggcaaagggtgggactggatctggcacagcgggtacgtgttttccttgaagcttccggatagcatcatgctaatactcccaggttggggtgaatacgttacgccctatacctcactcaccgtgtccaatcaagctgtcgccggccgcagcgcacggtcatacacgcgtgaaggtcggttcgatgcaattgcagcagtggttcaatcaggagattgggtgatcatcgagttcggccacaacgacggtggctctttgactcccaccgacaacgggcgcaccgattgttccggcacaggaagcgagacttgtagcacaacctacgacggggtcgccgagacagtgttgacgttcccggcatatgtcgagaatgccaccaaggtgttcaaggccaagggcgcgaatgtgatcatctcgagccaaacacccaacaacccctgggaaactggaaccttcacttatgccccctcgcggtttgtgggctatgcgcaggtggcagctgcagccgccggagtgccctatgttgaccacggggcctatgtggccgaccagttccagacgctgggcctgactgctgtcgatgcgtacttccccttggaccacacgcacaccagtcctaccggtgcatcggtagtggcccaggcctttttcaaggctgtggtttgtggtgatgttgcgctgaagagttccctgagcaccacctctttccctggttcgtgtctctaaacgaacagcagagtagcaagtacggacccgtgcaatctgagcttattttgtgactatgattgcgctgcctgtagagagagataacagaagattgcgtggcttcggctggacaactatatccaagagaaattgtagattgggttccagcccaatctggctcatgagcaggtaaatccgtaaggtttcgcaacaaggcaggaacactgagatgtaaagctctcgttgggaatcccagtaggttcaatttcattcctccagaatagaccgaacgatgccccggttttcgactcggtgataatattgattcacgttcacgaaacgagcatcaagggcaccctgggtctgtacaatatcgcgcagaactggccatagagagcaatcgtcgatggtaaacacggagcctcctaggtaatgttttccctgcagagtacactcccaatcctcaatcccgtattcaaacccactggctggattggtggcacagtgccgacgccagcgtgccagaaactggtcgatctttggcaataaactgcccccgcgtaacgaatccacgcctggccgtaaggtctcagtggatcggttagccatgtgcgctaggataacggagtcgcccgcgattatttctccatcacccgtttcatatattggcagtgtcgttggatcactatctctagctcccagttgctcatggttggtgatcaattgataccggacgccgttttcccccagacagagacgaacacgcaaattggccacgagatcacagccaagtaataattgacctgttgctgtagtcacaaagttgaccacgtcaaagccttcaccgtagacggcatcccaatcgaattcggtggcacgattttcctggccaaaagcaccaatgagacgtgcagttgcagcaggatccccatggaccacagcgcgggtgtgatccaatttcttactaacagccccttgtccccagattgtgttggccacagggtcgatgaaagtgccaatatgacggaaagtaagggaaatgcgctggccgccgtaggcttgctcctcggcagatttagttggattgggccgtttgtcggcccggattccatgaagccatcgcatgtttgtctttgggccaagaacgaaaagtgacccgtgaggaagaggcacgcgctgcgttgtccgacatggttcattttctccatcaggctcagatgccgaggtcttggtacggagaaccatcacgcgctcggcgcctagactgacgttgcagatgaaagaccctcgcacaatatccagcgtcttatctgagtgctctgatatacgatcctgtccatcacggtaaagctgaataagcacatgattcaaggggtggcctagtattcgctcgacagctatgcggacttcatcaaccgcggaggtaaatggcttgaagggtggagactcgtctgccggatgacggtatatgggtatggctccatcgggtcgaggttgaccttggactgcgaccaatcggggaacctgacccgacagatggtacatcttctgccaatctacctcggcatgtatacgctcaaaggagtctgcggccaagttgagattgttcacgaggcgcgagtcgccctccccgacgttattttgggatgtggttggtatctccgcgcattttgaaggtgttatcgtcccatcggggtcagcccgaggtctggctgaaggttcttttggaccttcccggcgcttcggacgacgggcacgcacgcggaccttcttttgatcttctactggaccccgcgcctgcgcagcagtagcgcgctgtgcgcgagaagaacgagcaggttcggggccatctgtgggagaggtgtccgcagtattccagaattccagaccatccatgacgctctcgagaccagcagtagcggctgacctcttagactgcggtgcgccttggcgggcaattgtctcagtctcatcccaatctagctcctgaatgagctcccgagcggtgataccagtcgctcccaagatatctgccatacgtcgcattgcttcttgatgccgctgaaaatcgcggaaacccaagcaatcctccacaagagttactgaaaacccgttgcggacagcatccaaagcggtcgcaaacacagagacattggacaacgagccacaaagatacaactcggtcacaaagtgtgtcctgaaggatagcacaaggccgggggactccagggcggagtaacctgttttgtcgactacaatgtcatgctgggcgttgatagcggccagaatcggtgcggggaactgatatcccggggtatgcggatcacagcatagcgaagagtcggcggagagaaaagcttcctggtcaacgggttctggagaatcatggtccgacgcaacttcaattatatccgaggtgggcatctcctttctgcggggtggctctctgtctagcacaatgcgatcaccaaagttccagtcgacgatagtctgaggggattcatatcgtgagcgcacccaaactacatcgccgactcgacggaatgcagatgccagctgtggaagggtctcgaggatatctggtgtattgaagacatgtaaagccccggacggacggacaaagtcattttgaaagtcaagtagtaacaaggcctttcgggtctggatggtgggcagatccccgaatgagaagacactcatcgtatagacatggtacgcccaggactaattggacagaccaaacaataccagtggatatgaggatatgcagagagaggggaggggcggagagcctggaggcctgaggcagaaatggtactttggaaggaacgatcgtcgaaaaagtcgaggcaggtacgaatcacgtgtacgaatataaaaaacatagaaagtctggaccctcacggcctcacgttgatattctgctatttccggagatcacgcctactccgggggagatatcggccagcccatgagacgaaccgtaaaacaatctaagacaatgagcctatctacggagtaccgagtatgcgctggtcgcactgggaaacgcaattcatgacataataaattcctatcctccaatcaggacacccgccggtgtcggtgtggatctccggggagcaaggtctgctctccggtaattttctacggtgactcgaatcgcccagcatatttgcccattatttaaattcccaagcttccccatccaacttcttcttttccacactctcctctcctccatatcttcacaatggcttctcgtggtcttccccgtgccctccgcctcgcccgcgtggccgctcctcgctcggtcattaccgcagcccttcctcgccctgtcatcgctgccgctgccgctatcccccgtgtctcctcggccgtcacctccgtccgtggtatcaagaccattgacttcgccggtgtcaaggaggacgtctacgagcgtgccgattggccccaggagaagctccaggagtacttcaagaacgacacccttgccctcatcggttacggctcccagggtcacggccaaggtctgaacctccgtgaccagggtctcaacgttatcgtcggtgtccgcaaggatggtgcctcatggaaggaggccatccaggacggctgggtccccggcaagaacctgttcgatgtgaccaccgccattgagaagggtaccattatcatgaacctgctctccgatgccgcccagtccgagacctggcccactatcaagcccctcctcaccaagggcaagactctctacttctcccacggtttctcccccgtcttcaaggacctcaccaaggtcgaggtgcccaaggacatcgatgtcatcctcgttgcccccaagggttccggccgtaccgttcgcactctcttccgtgagggccgcggtatcaactcctccatcgccgtcttccaggacgtcaccggccacgccaaggagcgcgccatcgccatgggtgttgccgtcggttccggctacctctatgagaccacctttgaaaaggaggtctactctgacctctacggagagcgtggctgccttatgggcggtatccacggtatgttcctcgcccagtacgaggttctccgtgagcgtggccacagcccctccgaggccttcaacgagaccgttgaggaagccacccagtccctgtaccccctcatcggtggtaacggtatggactggatgtacgctgcctgctccaccaccgcccgtcgcggtgccattgactggtccagccgcttcaaggacaccctgaagcccgtcttcaacgacctctacgacagcgtccacaacggcactgagacccagcgctcgctcgactacaactcgcagcccgactaccgcgagaagtacgagaaggagatgcaggagatccgcgatctcgagatctggcgcgccggcaaggctgtccgctctctccgccccgagaaccagaaataaataataccttgatacccgtgggggtgcaaaaaatgatgatgtactatgaactgtgttttttgggtttcaggtcgaaaatattattttgaggctttaccggccattccccagttactttcttttccattccgtagcttctagattgtttctggcggctcacacctgcagctgtagatcaatagacgccgaagcccggagaagaatccggggtaagataagagtcattctacgtctcgtctgtttctcctcctaaacctcttcttcagcctcttctccagcccacaatgacacctgatgttgcagttcaatcgcttactccggccgcagttgaagcggcgtatagcctcatccagccttacgtgcaccggacgccactgctgacatgcaaaacactcgacacaatcgcctcaacaccgcaatcccccgaagccttggtcggaacgccatttgaaggccaaactcccgctcacccacaaattcgattctttttcaagtgcgagaaccttcagcgaattggtgccttcaaagcacgtggtgcattccacgcattgctgcgactattggaggagcgcggggaggaagtcaaacggcgcggggtggttacacatagctctggtattttccgatcttctaccacacaaatcagaattatacatgctgaatcttctgtctttcagggaaccatgcacaagccctcgcccttgctgcctcgactctgggtattcccgcctatattgtgatgccccgcatcagcacgccatcgaagattgcgggtacgcagtcccacggcgcggaggtaatcttcagcggctcgacaagtgtagaacgggaagctgtggtgggagagatacaggcgaagacaaacgccattcttgtgccaccgtacgatgacttcaatgtcatttgtgggcagggtacaacggctttggagctggaggcacagcatgccgaacaagctgggtcccgacccctagatgccgttatcactcctattggtggaggtggactcaactccggcgtggcgacgtggttctcgaataagaagacacgcgtgttcggcgcagagcccagctttgaaggcgcagatgattgtcggcgcggactgcaggttggactgcgtgtggaagccgttcgcaccctcactatcgcagatgggctgcgcactccagtgggattactcaattgggaggtcatctctaatccgaagaaggtggaaggggtgttcgctgtcactgaagagcagatcaagtcggccatgcggttggttatagagcgcatgaagcttgttgttgagccgagtgcagtggttggattggccgtgtgtctgtttgatgagaacttcaggcgacgagtcgagcaagagggtggaaaggagggatgggatattggcattgtattcagcggcggcaacacaaccgtcgaggcaattgccaagctgtttacatgaatctacgaaatttgagcctacgaaattgaatataaagcattggcagagatgaatatacaccgtgaatagaaccgttcaatcaatgatgaggatcagtcatctcaaccccagagtcacgaatgtaaaatgaaaagctcccaccattgttcgcctctattgcttccacgatgcgacgaggccattcattgtgtccccacgtattaacccatgccgatatcttcccttgctgaaccacgctctgccgtgaaggggcgtctttcacggctgcatgagcggccatgtcgggtggaaatggacgaacagaagaccggtggacaatcagacgcagtgttgcaaaagtgccccagggtgcagggagagcaggtctcagcggcggagtacgagcctggggctggtcgtagtaaccagcgccagaagctcgaccccctgataccgttgtagtatacacaactgcacactgaaactgactctgcaaacccttcagctcgctcaccagctcggtatagaggtcagacaaatagaaacttttcttttgctcgcgctcggcgtcaatctctgcctgaggacgcccgatttcttctgtccgagcgacctcgtcacgcagccggtcttgtttgatgaaagcggtggcactgtcgatggcgatcatttgcaagggacgtgatgcggaacgatgtcgtgagagatcgaaaaggtacgattctagcgtgcggattgtcgccaaaagagcagatgaagattgcgggcgaaatacatggacatgctgcagtgaagaaacgagcaatgattcaagatgatgatctggcattcctcctgattgagccccgagacctgactcagatgttccacgctgcttcagtacgatatctcgagccacagtccttagtctttcggcatcgaatcggtggtcggtatctataaacaccacggctgcctctttgccactgactgagatgtctccatatcttcgtggtaagatagcgagagccgtgagatagtacaatagctgcgacttccccgaagccgacaggctgcttgaaatctccaagacaggaacctgttgtttcttgctaccggttgggtcagagggcaacacattggcaagtggctcaatgtcttgcgcgccgtgtatttcatccggcctagaaccctgaccagccgggcattcactgtgcagcagcatttcctcatcttcaagaatctgctgttctataggctcacttgaaggttgaagctgtccatcgttcatagcacctgacataggaagtgctttcggcgcaaagacttcaagcaaagtgtccagaatgggcacgcccaatgaatgcgggtcatggcttgagtgactaggaaacacacgggccaatacagagagtatctagaactagtcaactcaatgcattcaacgaaataggcaagctgcaatacctcgtccaatccctcttcatgtacatcggctagcgatctctccccgagattggctgccatgggtaagcactggactgcgtcatggatcttgcatcacttgatcttgaccaaggcgtttaaagcgcagtgaatagatgcgaccacagtagtagaagtgtagaagtgaagtgtacaacatacgagtggtgatgcgtgcggaatcgaatagcgcggctgacggagcttcggaacttcccaacttccaaacttttcccttgacaacaccaaacctccataatctcactctagttggattatctcatattcataatcgcaaatcacaatggctcctctcgtccccgtattctccgccgaatccctccccgatcatgtcaataccgttcgccgcaacttcatagacaaacgccgcaaaggcgaaccagtcaacctcaaggagtgtccattacttgaaatgacacaattctcttgcaatccaccacaaaatggagtccccgaaccgggggttgtggtgtgtgagcctgtggtgcgattgttccgacggtgagtcttaagctccgcgttcaagtcaaatggcaagctgatcttgtagctgtgctggtgggttaatggttgaaacaacatcatgggagccaattaggattgcagaggaagcaaagcaagcagcaagtacaaaacaatgagacggactactttgcattacgaatgcgcattgggcggagttggctatatgggattacgactatttgcaagtttcaagaataaaagttgcattcgaataatgcttgtgactgccatggggtatctcctcaggtcatgctcctgaataaaacacaagcgccagcccataatcgggggagaaaagaaaagaaaagaacgccggtaagccttatgcctttgtaatttacaggtcaatcatgagatccgctggctcgacacttgctagaggctttggagtcttatcctctcttcgccgtgcattcgagctcgtctggcgccagagatctcgctcacagttgacaatggggcccagctccgagatgttgagtcggggcttggtgtcggcattcgccgggtgtcccgagtcaatatccatagctgagttggtgattgtgctgtgggagtccttgctgtgctttttggatagtcccttgattgtcttttcgaacatgctttccatgctgtccattctccgaccccagagtttcttatcgcggccagtcgaacccgtctggttgtcgcggaatgccgcgcccgctaatttgcgcaaagcttcctcgccatgccgtccatcctctgcagcgcgttccctaattttgcgcgggtcgttgtctcgtccgatgaaaactgcggtggcagagtaggtgtgtttgctagggaagctcgggaagtgtttggggatatagggacgacttgcgcggtcgtcttcactgcttagagacgtgaggaatgggagagatttggatatttcattctctggtgggggagatggtagtaatgtcggcttgggttggtcaaagggcgttttgagatgagggagaagatcatcgggattgaggcggagacgcttcagagcgtggtcgaaatcgtgcggaattggttgaatacgtcgcgcagatagcatggactgacggatgaatgtagagagtcggagcatatctggagatttcaggcgcaaaccgtcaattcaagctccaaaatgaatacgataccaggtcacgtacactcttcagtagcactgcagagacttgacagcgcagctggatcggctaactcaaaccccgaatccttcaaagtctggccgactgcccgattcattaattggtccagttgggtgtcatcttgcacgactggctcggacatggacgggagaatcacgggctcttgtaaacgatggtggtgatggtaatgacgctttatccgcttcgcatggttctgatcgaatgatgaagcaggtcgtttggtatgggcgcccgatgtcgccatggcgattgtgttggtctaattcaagaagtggtcgtccagactaggcaatgttatcgagttgggtcacggtcacgtgctaaggcggtaagtagatcgatgtcatagaccttcgggggaggaggaagcaatgtgaatgaatggcttagtttgggcttgagtagataaattgcttgggtaggacattcattatatgacggcaaataattcgaccaacaaggcttcgttcgtcctacatatcctccatctcgaaggcttcctcgtggtcttgcttttggtattgacataggtagtgctaaatggcaaaaagctattccattgatgcaagtgattcattatatataaatctacaagaaaatagatctttgatcgttatttcgcagccgcggaatggtaagggagtagtgaacatgccataaattgtagttggctctcatagttagaccgaccaatccggcggctcgcttagtccgctccgaagcttcaacttcacttcacaaatcagccttcttccctacccccctctcctctccccaccaacgtccgaggcaggatttaagctgtccacaacccatattgcttttgctcaagcatcgattgacgcaacttattcgtcgcaatgcccgccgccattccccccattaccggcgtacgtgccccttccgttgaaggccgggttaacccgctcgggttaccaggtcaattgaggtgttcggaatgatttactgacattctatgcctctcacagatgctccgccgtggtcttgtccttgacctgagcaccgctttcggtaagtcgtgattccggatcgagtggcatgattcaagccgacaagttgaacctcgcgatctcgcgggagcaaccacatgaaatacaaacaccatgaagacggctgggatgagatcaacaagtgaaatagttgctgactagggttatctcatccactaggcttcggtactaccttcggctacctctggtggtacggtaagtagatttatccccggctgcgccaccacgcgatcgataattcgaaatctgacatgtgtttgtcctacaggataccacctcccccgcgtgcgtgagcgtgatacctactacgctcgcctcgagattgagcgtgctgcccagcggggttaaatcgatcaaccctgatcacctctcgatcgtctccctcccgcccgttcggcgccagttcttttctttgtcaaagcgttatctagaaatcgcccagtggtgggggcatatgcctccacgtcaccatcgggtctggttggatcgacgggtgtgtacgagtgggtggttagatttgagattgattgtacatatacgcctgtggacaaccgaccgttttgatttttggacttgactcttgaaatagattaccgattggccatggccatcgcagaccattctacgtagtagcgcccgaacgcacagagcgatatacttgacccctacgcctgaccaaccaaaatgagcgaattggatctattgtgttcaaacgctaattacgccggatatatgtacgtggaaacaccagcgcacccttcgcgggattgccgaaccatgtctccgccatgtgtaaagccataaccatcatcccgtatctggtcatccccgtggggtatgggcgagtgtctcgtatggaaccgatggaaaaacggcaagtatgaagccctaacaggcgttcaccgtagcactcggtcaaatgatatgcctcggacggtcccgccggccatggaggtgcgcacgtttttcttgaagttctcacgagtggcgcgaagatcttccgcggcgtccttattgagagggtcggatgcgtttggctcaaggaaaaggaactgcagtagaatacgggttagctcaagtaacgaccggttaaaaggaagacatcaacggacctgcatgcccacaatgacagcattcaaattcaacacgggcttccagtcctctcgtagaatatttaagcagacgttgccctccaaatcgatattggggtggtagatcttctgcgtgcatttgaccttgggggggtcatgggggaagttctgattcacggcaaagctaaagttgaagacgccacccttatacatgccctcgtccggttcgatagtcaaggtgaagttaaggatgtcgtcagggttcgggaaagacattttcatcgtactgccgagggtgagttcttgaaggtctaaagaaaaacaagaggttagagatatataacaataagccattaatcaagcagcgagagtaataatgtccgctgcgggagagtcactcacctcgttgcacgcgtaattgcgccgcggtgaccttcttcttcttcttgcctccagcaccctcggcattttcagcctcctgctgcttttgcttctgtacagacggttaggaatagtttgattttatagaagcgccaaataaagccctaccatcgaccagattttcaacattttggttgggagtgaccaccccacctggtggaacggacgggtttccgggagagcgaagtagaaagtttatggcgagataaccactctggggatgtcagagagtaaaggagagacagaagccagatgcagagctataaaaagcgagatcaacgggtgacaacggtgacaatgatgagagtaaaggatagccttgtgcttgcggggtctcagatcagcaatcgtcctttatcgcctctccgccttccattgacatattcgacctcgggaactccgtactatacacagtctatgggatatatatctctactaagtattgaaatctcgaggagaaaaaaattaattgaatatgaagtacataatcatagcgctccgaatgcgatcccggtgcatggctgatccgacaaaaaaagatcacagtaaccgtcaaggtaaaaccgcgcgaatacatactggctggcattgcaaaatgaaaagagaacagaattgggcatctttaggtagaatacagatcacggtatgggaaagaaaaaggagaacgaacaggaaatatgggtcaggggggtcatgaaaaaggggcattttttgctcgctggaattcaactaccggcgtgcaaagcagcatttgataccagtgcgacccaggaaccaacagcatccaatgaagcggaacaatgccacaatggcgttggaccacaagagggcctggaagaaacgggctgtacgggcggtggcggtattctatgatcatattagctggtggtctaataacaaggttaagagaaagggcgaaaactcactgtgaagccgaacttgtcgacggcctcgctggtgatgcagacggccatgagtgcattactgaagatccaaaaggtgacaagtcgggtacggaaactcttgtaggagtcctcgagggtcttttcgtcgttttccacgggggcaacgaatggggtgagcgcacgcttcacagttgcctcgaactgactgtcgatatccgcttggggcttgtcaatttcttctattaccgcttccttgctgccttcgtcctttgtggtcgtggctgacggcaatgcatcggccttgtcggaacccttcgtaccccaggagacatcgtgccaattgctgaaggcatagacgttcaagatgttgatataggacgactggacaaccatataggcagggaaggaggtgaacatgtgccatgggtcagcgtacatgaaggaggcaacgaagtaaagaccgaatgtggcagccaaggcaatgataatgataccagcacccgtcgaaccgaagaaagagtcaaggaaggcttttacgcctttgtcggtaacaaagtccatgggcgcgccgccggtgaacgcacgaacgaccaggtagatcgaatcgaccacaatgtagacctgaatgagaccgaagaccacgaatgaagcgaggtaggagaacttggaacccttgggtctgttaccgagcgcgagaatgaactgcagcaataggaaagcgaggtatccgtacttgacaatggtgttgataatgggcgtggccgtcttgccgaaggggaaagcggtttgtccgttgctggcgctgggagtaccgacaaggtcaatgatgacagtggtggtcagccagtatgatgccagggagaaccaggtgaggatagtgttgaagatgttatacaacatctgaatgtggaggaagaacatgcgcacgatgttgtgaccactcttgtacatacgtccaaagtgcatcagcgagtaaataccggctgcaaaagaaccgttgagccaacggcgacgctgggagatgaactcggcagcaccttcgggcacatcagtttcacccttagaggctttgacgtaggacaagtgccacttagagcctgctttggcgaccaactcgaaacagagaattcgatcctcggccaagaacatgttcttcttgaaaatgttcataccctcaatacccttctttccgagctgcttagacagcgtgtgatcaccatggaaatattgttcgagagggcgacccatgattgcacggaatcgataggccgagaatgcaccgggcaagacactaacgtaaccaaacgaactctccagaggcttatccaagatgttactgatcttgtactcgaagttctgagcagccacgagagggttgatcaagtttttccatcccttacccagcatagcgtgaatttcaccacaagcgccgccgagatccttgtcgttatagaatgcttcccagaggtacaacaacgacttagggccaggcttcgtaccggcatccagaaggatacagatctcggggttcagaatgcggccgaaggcgttaaagagccaacgatgcgaattgatcttcttgctgttcttttgtttcaaacagaacatcatttgcactggtgggagtgtgctgggcccatcgtccgtaggccgaatgagctgctgacttggcgtgaccgaaagctgagtcgtatattcaaactggatattctgttagcgctatttcatttggagccatattccgtccacttacaatatgcgccaaagtctccttgccgtcaacgtcgcgcttcatgacaccatcctggtagataccgacagtcgcaagaacgtcaagagtatccttgtcgcaagggtcaataccatcaaagaccagcgccacaacaatcttctgccacgcgggtccacccttgttccagaactcggatttcttcaggttgacaatgtcgcgaatgttctgcatcacaccgtgcaaggtacgggccgttagattcttatcctcgttgtagtaggtaatcgcgatgagcagctccgtatgacggttgtacatcgcggggcgcagattgtaaccattgtggagagtgaattcgttaggatcacaagtggctgcggtgtctatgaagtgaaggctcattagtctttttctcttagagccatatgttcggtccacacgtacatcgcatgtgggtaaactcctcgcttccaccttccacgtcgttgcggtatttggcttggatggcattctggatggcactgggcacggggtagtcgacactcaggacggaaccctgcactagcttgaccttcctggtagcatatctgcgcaagccaccgccagcaccaccaccgacaccaccgcccccaggggcctgtcgctggcgccaagcctctgtggatgaggtttcgctgcgggcgtagggcgatgcaactcggccggggaccccaaaggctgccgcggtggtctcatcctggccggagtagacgttgccagtattatatgggtcgtggtacgaaggggcggtgtccgctgcgtaggtctccgtcaagctgtaccccgaagctgggcgctggggagaaacgccgcgcgagtgggggtcatcaaagggcgtcgcgaatggaccctgctgttgggacaataatccgcgggctgcatcctcatcctcgcgatactaaagaaaaaaaaaacaccgaggtcagctctagcaactagttcaccgcctctccacacacatacctgcgaagatggcacatcctgcagatgaacaccgtcatcgtagcccggggagtgcgagccagagccgtggtaggccatggtgtcgcaaaggttgaaaaatcagaaagggatgtgtttcaaagctgacaggagaggggtatctgttcaagcagggcgcatttatgaacaattatcgaagcaacggggctaggggaagggagaaagtgaaatctgtttttcccgagaatcttggaatattgcaaatgttttgaatcaagggtcaaagaaaagaaaggaagagaagggggggaaagggtaaaaaaaaagggagacagtcagactagaagggtcaaaaatagaccgtctctaaccccgtcctggtttagtttcccctttattttgggggtttttttcatttgactagtttattggaattatttgtatctttaaatatgtacggagtatttatttttgactattctatactagccatggatatccttgacttagtcgtaaatcgcatacatactccatgtccatccctggagaacaatagcccgatggccccccgaggccctatggaggaccctcactggttaggaggcgaaagctgagatgctcggaattctgacatttactctagtctccttttcgttctgattcgtggccttctattgattctatgatgctttgggtagggagcagccttggaactacatacatactccagatcttttatacgtggtactgagtggactagaacacccgaacctaataaacttgctccactggtgaaacacttggtgaatagacctctcatataagagttcagtttggttcacctaggtagatatagagaattcattccacattcttgagagaacaacaataccattagaaaaggcttgacacctagggcggtatgcccgactccactataggtgtttgaatgccagcacataaatgtgttcaaagccctcggctacagcgtcccgttttaattcctcaattgcaggctgagcttattctgtaattctttgtgtatggttattctatcattctaccaagtactctagcatgaagtatactctgaggtcacctgactctggtaattttagacctcactgtggaccctaagcatttagcgtatgtatattttgctgtgccaagtcgattagcctattatattccaaggctaacattaaccttgggctgagttgtgctgatgttcagcctcgtagtcagttcattccatatgcggtggctatgtcactgcgccccgaggtatacgatgattaccatgggttgaaaatttcgaatcttaatttcccttaatgtccctgatttcccttttttccccgtttccccaattccccaattcgccaagataataagatttcagtgaccccattcgtctggtccacggaaggcagttagagattaattgccgctaacccgattggggaaatacaccagaaacagcacccggacaacaagataagcagacaaaccaaacaaacacgccaaacaaaccacaaacaaaccaaatcagacaaacagccaacgaaaaactctatttctcgcaatcttggaaaatcgatgatccgagagtccagacccgcggaccacttgcaggcacagtaagatgcccacttatgttcctcgcatccatgtaaggtgaacatgggatgaaacaatctgatagcatatttaatattaaaggctgtagcatctcagatttcacttcatttttccctgcatgttttcgccttatatcctctctacaccagacctaggtactactataaaatatacaccacaacccgttgtgtacctgactaccccgtatattacccgtggaacctcacgggcccgtgaccaaggcccccccaattatccccccgtctctcttttgacttgtcatactctctatctccctctctctctctcatttattcatctattctccccacactgatcttgcgatcgggtgtggtttgtgagtcgattttctctgatacgcgcgtcgggccaacgtcaacaaatcaagcccccctatcccgaccgtctttgacatatacaatccctgtcaagtgtctggaccattccgaggaccatgaccatcacttaaatcgcatctcgaccttgatttcacacacgacactcgtttcctgccacgcctcacggctcggctttgatgatctactgtttacgctcacgacttgacgccgattgagcaccttacactccttttttcttattttatcttgcacattctttgccgttgaccggctttatcgatatctttctctgttttttatctcgatcttcctcgcctaccatgtctttcgaacccatggattccgccttcttccccgcccgctccgtcttcaagcgctgcaagcagtgtgaaaccacatcccccgcctgtcccgcatgtcccgatggatcaatatgtaccatgaccgccccgagctgtgatgcatgcgccaccactaagtgcgtttcaacgggcgccgcgccctcgaactccgggggcaccgacactggcgctattgctggtggtgttgtcggaggcgtggctgccatcgccatcgttgtattcttgatatggtggttcatcatccgaaagaagcgcctggagcgccaggaggcggagaagaacggttcattcgcagcagctcgcagtgaacgccggtccatcgcctctacagtcctaacccgtgcctccaatgtaatccaaatcgcttacattcctggtgtcaccaaccgctctccaccgcagaccccatccacccttatgcctcctattccaccgcttcctggtgcgacacccgatcaacacttcttcatgccgggtgacctgcgtgactcgtcatggacgaccactaccggccaccagagcatctcccccactttgcgcagcagtgtggccaccaccatctaccgcaacgatgccattgtcagtgccgttcctgcgcagcagatacagcggactcgggcagccgtcgtgagtatccacaacggaggacctgggtcggcgaatgcccctggagacgactcgcccgttactgtcacgattacccctgcagacgcacccgctgtcccagccattaccccggcgcaactcgctcgggcggaggctgtcaagggcaacagttcatgtattgctcgcagtgtaaccgccaagccagtgatggtgcgtggcccttcggtgaagaacaagcaagccaacaacgcgcccgctgccaaccgagtcgaagagctgtccgggaacagtaaaagcaatgacaccagcccgacagtatcaaccacaaacagcaaccagtccagtccgttctcatcggtcgaagatgaagctgccgattcttcgattcgcgacgcacgtcgcgcttccggcttgagtgacggacgtaactcccctcggacgccacccgcacgggtagaaagtccattctcggatgccaatgaggtgaaatgagctggtctgggaccaactgggcgcaacggtttttctattttgtgatttcccactatgctttctctgtatgtatggagcctaccatggctttttgtaccttttagatatgtccttccttcgggtgccttgtacagcgagtgttggcacactgagatgggattgtcgattgaatctttactctcattcattttcattttggagtatcataccttcacattcgtactgccatgagaatccgtgttacactgtcctataggcttctttcggactaaactatctctatcgcgaattttccaaaaaccgaagcagataaaatgtttaaagtaatcgcagaataaaaatgagacccttcccacttcacttctaaagtcactcttgactactagctcgcagacggacttgtgctgtctttacatggagatagtatcaccatgcttctgatttatatacttaagactagccgaattcacttaactacatatttttcgtcatacttttcgttttgttttgttttcgttttctcgaaccttgttatatatttcccagctcgaacaacaccaaacacacaagacctatacacctaaccgcccctctagcccgccccaagatcccaaagcctcttaaactcgctatctcgcttcacaagagcgggaggacaatcccattctaggagccgaccaccccccataacagcaacacgatcaaagtcgacgacggcaccaaggcgatgcgcaacagcaataacgcgcatcatatcccggatgagccgctcggaccgctcatcgacgttgctgctcgcttcgtcgattaggacgatccgtttgccggccagcatagcccgggcgatgcacaggagctggcgccggccctgcgagagccggtcggcgtctagcgggctgtctagaccgcccagccgatctacgacatcgtccctcttgagctggtgcagcactgtttacccatagtaagaggttagtgccgtgtttttttgtgtcacattggggcttgggggcgctgttaaaactcacatcagcagaaagcgacaaagggcacaagtgtggatgcaaaatacccagaaaagacgcacatcaggatgaccgacatgatgatgagggcgaagggcagctcggtgtcgacagccgacatgtcctggctgaagcgattcgtggtgacttcgacgtcggtacgcgagaagaaggccactggggtattcatgacggaatggagaagccgggcgtggagaacctcggagctcgaagccaccatgacgaccaggaagagatatgcagcccctgtgatgcccaagacggcaagaccagtgagctttgcgaggagaccgaggcagtagtcattggtggcttggccggatccttctgtagtgtctgtccagaagctgagtacgagtgccgtcatccgataacttcccgtgtacagaatggtgaggacagcgagcagtatggtgtgccatacagggacggagccaaagtaatacgcatatgtggcaaactcgccgaggactcgtccgggcgattcagagtcgtcgctgtcctgttcagcatcttgttcatatcggccccgaggaacagtctcgtggcgatgctgcaccgatgcgtcagctgcgtcctgcgtgtcaatcgcgccgttctgctcgactgccagcccatgcggataatctgtatcggatcgaagttgggcgaatgacccctgatgcacgatatggccgctcacatccagagcgacgataagatctgcataggcgagtctatggatggcgttcgtgacacagaccatagttatgctcatctcttggaagagacccgtctcggcaaaaagattctgtaagacgtgctcctcggtcgccgcatcctgccctgcaaagacatcttccaacaagacagtcttcttcgtggattagacggctcgggccaaggcgagccgctgcttttggccgccgctcaacgaagaccccgcgctgcctgcccttgtcgcatcttcgtcgggaagctcgttgatatcctactctagcccgcacgcgtagacaactttgtcgtaccattccgcgtcgtagctggcactgcctaggatattatggcgtatcgtcaggttctggattcagggctcctgaccaacaaacgcgatattgccgggatcggcatggatggaacccgcttggagcgggacttctcctagaatggctcgcatgagagtgctcttgcctgagccgacaggtccaacgacgaaggtgaatctgcggattccaacagtgatgtcgttgaggatgtccggctttccgggaacccagccaaaattggctcctgatatcgctacaagcgtgtctcctttctcatcggcttagcttggatgatgatcccgctcgcccaagggcaggaacaagagcagaaatccatcgacgaaggcgagcacggcggcggacgtccgcaaccgagagaaaggccacttctctgcattcagagcccagtacaccaagactgcaagttatagagccgtgtagacgccgatcaacccctgcagttactgaactagtcagtagttgttttttcttgggccagagaaaaactagggcggaggttatcacgtgccacttccacgattggccggtggcttttggcgaccttgcgaggctgtctcgcgagccagaagagactctgtagggacacaaccagaaatagagccgaggggacgatgcagagaatggcgtcctcgaaggctggcataaagtcgaaagcgcctgtgctagcaacgacggcaaaccgagcttcgggcgacatttctaacctctcacctagctatcctttgaagccttatcaaaatactggaaggctttcattggagaagttggttatattgggctggttgcgcgatatgaaggaatctggtgcaatattacgtttcatggcgtactggcggttggagactgccataggaagggaatcggtcaaatacgtagatttaccattaacgtttgttcgaaacctgcttattggtcaggtaaaatgatacaaggtcaatgaaatgatgatcagatcatagaattgaatcttgtcttctcgttctgttgtgcccctttgtatacatcagtaccccgcttccaggtcccaacgacttccagacctatatcgtaggcggatcaaggaacagtactccgatccatagttttacactgttcctctttgacaacgacgaataatattatgaaagaagagatccataacacaactactccgtattcgaagtggcacccactaatcgggaaggtgggtactataagggccgggccgtgttctggaacaaccacgatgttgtacatactcgaatctatcattttattaaattctcattaaatacgatgcttgaagtagaggcaaataagctcctagcattggagaagatagagagagtaagccatctttgctcaaactaggaaatagggccttggctgagagtgacaagggcatatcgacaagacctgattttgaccgtcacacctataagatgtacattcttttaacactatttgacatgtttcttacgcatatatacaagcttctgcacgccttccggttgcttggttgaatgattaatatagattacataaaactaactagagtggtgattggcccataccgctaaaatatattccccgaagtacataaaccaaactgcgttcaaatccgagtccgatcctaatagaatctataacagcccgacagctcccttattatatgaatattccactcatccctgagacttttcttgcgtcttttctgacgaattatgaggtacgtcggggttctcatccaatcgttcggtaacaagctccttcagagaatgttttggagaagtactggggaacatgtcagatatatagcatgagtggaattgtctattgcctcactcacgatgtaaatgaattctcgtagtctgcccggatttgcctatctgactcttccttgtccacgatcttttgaaggtcttcagggagaggctccgaaatcgactctctgtcttcttcgcgttcaggcataatgttctaggatttagatactataaccgtggatgtggataagtctagaatcattccaggtaggaatgcggataatataggctactttgtatagatcggtggtaccgcggtagacatggagggcgcccctcacattattgacgtcacgcgagacaatccggttatctcctgaacttcgggcgacctgagccgtccgatcgtagaaggttcacgggatggtgagtcattattgcttcattatgatgtaatgcgccgaaatggcctgaggtatggatatctcggaaatatgtcggccaaaacccccctcatatcttccctcgccatcccctccatcgcggtttctcaatccttgccaatcttttctagcacagttgtacggtggccgaagtcatcttttgactaaagaaatgtccgagaaagaacaaaaagacggttcggcggctctcgggctgcagaggacagagactaaggagtccctggaggatttgggaatatcagacaagtctccaccattggacgtcaactatccagaagttggtcgtgcagagaaccctgaattccccgaggagtacaccatcgagacgaaaactggcctcgtccctgaatcagcactgaagcaggtacgctctgaggcgagccagcacaaggcctcacggcaggactcgaaagagtcaggaaagcgttaatgaccttctcctctccgacaatgagaatcatcatgctgtctctttagctgcatcatttgtgattgtctacattgcatattccatgtccatcgccaccgacttcgactcgagggatcgagcttcatttgggaaaactacaacatctcgctcgaggtcaccacattcacctgctctatcatcgtctgtggattcgtcacgcctctgcttaggtctcctttgcccgacacaattgatcaagggcctgaatacattgtctcgctgagttggtgtttgcattcaacatctcatatactccgtcgccgaatattggcgggctccttgtctgcaggttcttgtgttgcgttccggttcaggcctatcactggccggtgattgaagagcccatcctgatacagctcctcattgtgattctgtcgtcggcccgattgtttgcggttgaatcaacattggctcgcgtcgtcttgaattgttcttttgcgttaatatagcgttttctcgttgaagctattcttattatacataaatctctaattttccactatataatgacatattactggtgtttaaaaaaaagtgatttaattctgccggacttaataattctatacttttgaatcctacttgatatacggagttgtcaaaaaattcctacactttgatcagataacaacgtgtatttgatcgcatacctattctttcaatcccttaatcatgattgatagagcagtcgttaaaatagttgtgaaagcagttgttgacgatgaagtagttgatgtgataaaagtgacttaattttgttagtggtttatatacaaattgtaggtatctaccgtcttgctagnnnnnnnnnnnnnnnnnnnnnnnnnnnnnnnnnnnnnnnnnnnnnnnnnnnnnnnnnnnnnnnnnnnnnnnnnnnnnnnnnnnnnnnnnnnnnnnnnnnnnnnnnnnnnnnnnnnnnnnnnnnnnnnnnnnnnnnnnnnnnnnnnnnnnagggggggggggggtcgaattagcaatgggagtccctgtcagtcacaaccccctattcttatacatacctcaatcgttctaatcaatatggcaggcagtcgaagataggtggacaattatacagtgggaaggcttcaaacccaagagataagggaattccaggatttgcataggtacgaatagcgtcacatctattgaagtagaaagggaaagaatcgtgagtcgctagaagaaagacagatcctcacgtctagctgtttgtaaacatggaggaaaatcaagggtatataaccagaatatctagtcaacaatgctcagcatccggtaattcaagccacactctcatccagccccattccacgtccgattttacgaatcaatgcccgcttgagaagagcttcacgtgcaagactccgtgtatgccgtgaccaggaatcgacaccaataacaccgcggaccagcgcagcctgcaacgcatagagcgcttgctgtataccttgctcctcggccactaaatcatatagctgtttccctaccacggtgggggcgactaggacgtcatcaattgggggctggccggccggagtgtctggagtagcggagcttgaagcagcgccagaagcggagacagagcgggcctgcgcgtctgcaatggtagcgtcggcgcgatggatagattgctgtaggacagcggtgttggattggagggtcgcatggagagtattgagcgccgagagttccccctgcagtgtggtcatagcgccatgcagggactgtgattgtgagacaagagactgcgctgccgtgtcggattgagcagcgttagcacggagggtttccgccagggtctgggacacgacatgaaggagtgcatctttctctgggtttggcgggatgggaggcgctggtcctgctggcgcgattgagggtagctcgacttcaaatggcgaggttagaaggtcgggtgtgtcggccttgatgggagctgctgggggtggacggggataattggatgggtatggagaatgctgaggatatgggggaccaagcggttgctggtgtggttgctgggggaattgcggctgcataggcaagtgagcccccgtaggttgagcttgaagagggagttggcttaaagacccagccgcatgatggagcggcgcaccactgtttctataatacggtgcttgaccctgcgccgactggggctgccccgctggctgatggattggtgggtgtgacaagggacgaggactgcttatcggccctccagtttgggccggtggcgcgtaattctggtatgagtggattcttgggctagccaattgtgcggacacatatggttgacgagagccttgctcttttggtggaggtagcggtggggaatattgatattgatcgaccgggtgccgttgttgttgctgctgcagatgttctccagccgcgcctggcttcggcggaggcgggggtggaatctggctctgacgctggccttggcttgtaggcggagacatagactgagcttgtcttgaagatccgacaccgggtggaaggggaggtaagggcgggggtgtttgcgcagcttccagctgaggatgtggcacttgttgtctgtatcggactggtggctccttggcaaatacatcctgaagaatagaaagaagatcggcaatgttggatctctgtgaataaaatagtcagcggtctgtaaacccatatcttgcgagcactaacctcccaggcttcagcccagtgtgctagatagtggtggtacacctgtccctccagcgtcacatgttgcccaactcggacagccatttcctgcgtcggcgtcacgtaggcaattggagggtcgcgtgggtatgtatttggaatccaaagcgcaatgggaaatcgatatgtcgttcctcggaaggtgacaggcaacgtgcccacaagatgaaggaggagggccgagaaccctgtctcgtaggctgctgggcattagaaaatatgaatcgcataagaaacatatggacactcactgtagacatctgttcgaggggagagcgaggggtactgggagagcgcattggcgacatcgtggtaggtccggtttgggtcgcggtaggtctgttgtggatcatagtgatcctggaggggtttagtaggtcggataacatgaagttttcggagagaccaactttggacaggacactatacagccaattcagtgtcctctgagggaccgccatagcgagaggaatgatggaaaagggttggaggcgcgacagtttcctcttccccgcagagtttcttggcgaagtatggaccttgtggtcttttcaaaatgttgtattagaagatatattttgataggagatactatttcttagtagtcttagtctctatgatctaggtataggtgacaaggtagttccagtgtacggagcataactactaagcaacttggtgacacctccactgcgccttaactacatctccgtacaccttacacctcacctcaccatttcatcattgaaataatcttgtcttgcttttgtcccttcgtaacacgagaagatacaggttcgagtctgaataaataatagcactccttttgctgctgaagtctcgaggagcgagacagattcgctaaatgataggctaatggtctgaatcagagacctctgtcttatatgacacgtccaggcctctccagaactctatcgacaaggcacatccttgagatcctcgaatccctggaactcattgacatcgttaaaatcctcgaaatccttgagtcggggtttgtatccctggaaacccggaacaaagaaaaccaagcttgagcttcgcaagccagtgatattcacaagaaagcctgagtattctgaagatctcatgcagccattatcacccggtacctagaaattgatgggctcctttgtttcatttaatattgttcttcccattcccttagtattgttcttttactcacattgaagggcataatgatctggacctggactgattattatacattgccttcgccattgtctgtctcggtctctatgacgctggccattcaccctgattctcttgatgatattgctgatttatatttacaagtcctacaagggcttttaaaacagacctcatcttctaacatgcatacttcgacctaacttcagaattatctatgtgaccactcctttaattctttcaactgaacttcaattaccaaagtcatggcggcgacaccatctccaagtcccggattcgatccatccacccagaccgtcatcttccacctacgagatggcactgagttacccgtctcagtacaagcactggacatcttcgtcatgtacaatgtccgggtatgcatcaactacggttgccagtttggggcatcgctcacgttgctggttattcttctgcttttgacccattccgacaagcgccgttcggcggtttttatcctgaacgccctggcgttgttcctcaacagcgggcgtctgcttttccaagtcatccacttctctactggattcgaaacggtatatccattcgtctccggcgactattcatccgtgccgtggagcgcatacgccatttccatcgtggctgtcgttctcaccaccctagtcgtcgtctgcatcgaagcatcacttgtgattcaagtgcacgttgtttgctctacactatgtcgtcgataccgacatcctctcctagtgttatctgttctggtcgccctggtgccgattggattccgctgtgcatggatggttgtgaactgcaaggccatcatcacactcaactacatgtctgatatatggtggatagaaagcgcaaccaacatctgcgtcaccatcagcatctgcttcttctgcgtcatcttcgtcaccaagctcggattcgccatcaaacagcgccgccgactcggcgtgcgcgaattcggcccgatgaaagtcatcttcgtcatgggctgccagaccatggttgtccccgccatcttctccatcgtccagtactacatcactgtgccagaactggcctccaatgtggtgacattggtcgtcatctcactcccactctcgtcaatctgggcgggtgccgccctcgagcactcccgacgtaccggaagccaagatcctcaacgccgacgcaacttatggcgggtccttgctggtggtgcagaaagcttactgtctcccacaaaggacagtccaacgagcctgactgctatgactgctgcgcagactctgtgctactcggaccataccatgagcaagagctcatacaactcgcgcgacaacgatgctttctatggaatatcggttgaacacgatattacgatcaatcgagttcaaagaaacaatgagatcgtgtgatgagcacagcgctccgcaattcagagataccctcctttcatttcgatgtacaggatcttggccagacatcgactttacgcgtaaattgtttttttttttttctttttttcttcaattgggttctatactggctcaccattccgtttggctcaatctgcaaagtgtaaatgcattcttaataccaagtcatattcattatttttcactccttgctttcgagagccatagttgcattacatgacgtttgactgcattgtagatctacgagtgggtgaacttgagggtttcccatgttctttctcactaatagtaagtgtctatattgaggacaggttctgctctgaagttcaaatggagtctcaacagtaagaaagaagttgagtataccatcgaggatgggattagaatacatatatgtatgaagcttgtgcaataaatacagccagtctactgaatgcaacaaattgcgatgagcagagtcaagtgaattaacaatacataaaaaaaagccacaaatatttacaggtgaaacgctctatgttcagaaccacatgtgcgccagagccaaaggacaaaaaggagctagaaaattaatagtatccggtgctaattcagttccacatagttggctaggaatgttagaaaacgtaataaattgaacaagaaagacttgaaacacttacccggaaactggccctcccgacctccaattcgcccagaccaccattcattggtattttcagagcgctgggtaatctcaataacatcaccagctgagaatcccagatcaccgtgtgcctgagcctcgtagtcataaagagcggtgacagtctcaaccggcttactgagatgggacggcttcgcctttggaggaggcggggcggccttgctcttggcggcggaagagaagctgcctgtcgggctagcgccggcagacgaataaggtggtggagggttgtcatcggtggcggtggaggcggaacggcctcggccgatggagcctttggtatcggatctcttgctatcggatctcttgatatcgcctgccttgcccggagggcctagtttggatccagagcggcggacgccttgggttttaaagtgcacgatggtaagggcttcagcttgttcctggatattgccgcgcttctgctcaaaggcctcttccacgtcgagttcaagattgaaataggcgatgttcataccctgcattcgttcgtggagggtgtagaagacgttgagttgcatatagtagaaagactggaagagcgggcggatgaactcggcttcgagggcgaacagcttgggcagttcgtcctttagtaaatcgttgtaatagttaaactcctgggttgccacctcaacatcgttctcggctttgtatagtgctttctcgtctttgagcgatttgtcctttttctcttcgagctttttcagtgtcgcgttgcggcgatcaaagtccagcttcttgtgatcacgcttaaccgcgaccttccggatcaccttgatcacctcgagcagctggtcggccgggctgataatgcggctgttgatcatctccagctcgggggctagggcctcttggagttcctggacaatgacttcatattcctcacaggcctggatgccctcggcatttccttcgaattggtaggaggtgggatcggaggcgcgaccggagatgggtttgtagatttcggcgactgctttggagaattcaatttggtggctcaacatgcctgcgcacgcgatcagtagggagaggtatagagtggagagatcaaagagttaccattaatggcagaaaagtatttcttggactcatcgtggagcttcttggtctctcgctcgagctcatcaaagcggcgttcggcatcggtatagacagcatccttggaatgctcaccgatgttgaacttgaccttgaactgctgtggcgcacgcgcaatactcttctggaagcctttaaaactcatgatgtggagtatattaaggagagaagtgaagaagagaaagtgccaaggtggggggaaagaagaagaaggaacccaaaccttttcaatgacataagacttggccagcgttgtacggagctgatgtccagtgtggctgtacccatttccttttatactattccacgctattttgtactattctatacgctactgttctgccctatgatcatgtggcgcatatcttcttaggcacctggattacgacctacaacatacatactacatacggtagtacttcaactcctgtccatgttctatagtgtatagttacagagtactccgtacatattttagctctaaacacctcgaatggttacagtgcttacatctctactctcgacgacctcaagaactgtttctctttcctcggcagccttacccgagaatgtcctaagatcaaattaaggaccccagtccgttcgtcatcattgggccattcttccttgggacgtgcgggggggggtgacttggcaatgagatgaaatgggtgaatacaagaagtcggaagaaagagggctctaaaatgatcaaattagaatcctcaagactgttataaaacagagaaatgaagatctgatatagtcatggacgccctggatacttatacccgaaaggggaaagctcataactccgtcatgcctcaggcatcacggataaactcaattgggaaaaccccgagatctttagtcattgggaggagatgcaagtgataactaacaaaaagtcgtagcgtttccttttcatcccaccttcaaggatatcggcacaaatcatctccataatgacaagtgctgttcccactgcttggagacaggcctctgccttctccaggcgtctttcaacttatggttcccgagctcctcgagtcctcgccaccgggctgcgcggtgctcgttcttatgtatccgaaacaaaagttggccaagcccaggttaacatcgagactgccatcaaggaggaacaaaaggcattcatgaaccagtcccacatggcgccccagagcgtcaagctgcctggctcggcaacctccggtgacgccgcgttgagcccttcggccggcatcctgaagcaagccaccgttatggaccagggcacccggcccatctaccttgatatgcaggccactacacctctggaccctcgcgttctggatgctatgcttccttacctcaccggcatttacggtaacccgcactcgcgcacacacgcctacggttgggagtcggagaagggagttgaggaggctcgcgagcatatcgccaagctgattggggccgacccaaaggagattatctttacaagtggtgcgacggagagtaacaatatgagtttgaagggcgtggcacggttctttggtcgctcgggaaagaaaaatcatatcatcactacccagactgaacacaagtgtgtgctcgacagttgccgacacttgcaggatgaaggtttcgaggtgacttacctgccagtgcagagcaacggtttgatccgcatgtcggatcttgaagaggccatgcgtcccgagacttgcattgtcagtgtcatggctgttaacaatgagatcggtgtgatccagccgatggaggagattggccgtctctgtcggtccaagaaggtgttcttccacaccgacgctgcccaggctgttggaaagattccgttggatgtgaacaagctgaacatcgatctgatgtcgatttccagccacaagatctacggccctaagggtattggtgcttgcttcgtgcgtcgtcgcccgcgtgtccgtctcgatcctctcatcactggtggtggacaggaaagaggtctacgtagtggcaccttggctccttccctggtcgtgggctttggcgaggcatgccgaattgctgcccaagatatggaggtaagctctttcccattttctatttcccgtttccatcattgctgccattattacgcactgtgatagaccttttggagactaggtaatccgtgttcttggacatggtactcagttccaatgacgtcaggcgcgggcgtaatgctggcagacagatgaactctatctttcccgtcggaaaacagtatgctaactgactggttaatagtacgacactaaacacatcgatcgcctgtcgaagcgtctgagcgagggcctccttgcaatggaacacaccacgctaaacggtgaccccgagcaccactaccctggctgcgtgaacatctcattcgcctacgttgagggtgaatccctactgatggcgctgaacgacattgcgctgtcatcgggcagtgcctgtacctccgcctctctggaacccagctacgtgctgcgcgctttgggcagcagtgacgagagtgcgcacagcagtatccgtttcggtattggtcgattcacctcggacgaggagattgactacgttctcaaggctgtccaggctcgtgtatctttcttgcgcgaactgagcccgctttgggagttggttcaggagggagttgatttgaacacgatcgagtggagccagcattgatcatattaattttattttgagagcaaaagcccattagggacggcgttgaagtgtaacaacatcggatttgtacagactggaaataatcaccacgcaattaaatactctctatcttccctctaagccccgatgccttgtacgtcacctggattacctcaagggctccccggggtctaagatatcactcgagtaagacctatgtcttgtatgatcagtctgtaatatgaacagcatttaattaatttggaattttctctcggcccaaaacccaccgtagtctgaaggctgtctactctttggcaaagaagttaaatttatctaccgagagtcaattcgtaggttgcacttgatttccacgatgcatctattcctcatcctttgcacattcgggggtaatgcagccgctctccctggtcaccgatcaccggagcttcaagtggtaacctcttccggctctttgaatgggatatacaacgactcagcacacacagtacgggcatttcttgggactccatatcgccagagttccatatcttatacggaagaatgctccaaatagactcatcggagtacgtatgcacctgtggacagggattgccgaaggaggatgcatcgatggggctttggggtggtgattttgggcgtcgtggtgcccatcgcagttcttggactgggggctcggcatatgtctgaagactgtttgtatttgaatatctgggcaccttctgtcaagcatcgaggctttaggggacttcaaaaagctgcagtcatgattttcattcatggagggagctgtgacactggtgctagttcggttgcctactacgatggcacgaattcggtacggaatcacgacgatctgattgttgttacttttaagtaaggagatgctgggttttggctattagatttactaaactctggccagttatcggctcaatgtttcttggatttctgaatgccaggtatcgacccttccgagcagaatcttggactcctggaccaggtagatattgagaatctgtggttgagagagtacgaatgaactgaccatatttagcgattggcaatccagtggggtcatgaaaatatagccgaattcagtggtgatccagataggattcttctgtttggtcaatctgctggagctgcttcggttgatatccattcatatgcagtgagcacgtcgtttctatattggtgttttcatatatgaataacctctgatagtaccctgaaaatccgctcgctagtgcatttgctcttcattccggtaccgctccgttactggtttaaccattcgagtgaatcggcaggtgcccacttggaggtatctataccatggatattttaccaatctcagcccacctccatggcttggagcatatcacgggggtaagaagaaagcagctatttgcttgctggtttgattaagagcatgatgacagctgagatacctttggtttttggaactataacatgtctatgatccctttgtcagccaaggttagtgtcaggcattgcgtggattgacgaatttcttggggcttgggttgcatttgccaaggatcctcgtacgggactgagcaaatatgggtggccagcgttcagctttgatcgtagattgatgttctctcgtttgtgatttgaggctgatcatgggatggagccaaccttgatcaacctcgctctgaataacactgttcaggcagtatttactgggagttcctgggatctcttgtgaagtcactcggtctgagctgtaagtttggcggagttatattgtgctacgatgggagagctaggtatttccagactcgtttgaaatgtgttccatgatatttaccgagccttgcatggataggagtctaccccgtatacgtacgtaccttgaggcctatgatgtatacctcggacctcggccagacttattattaatcagtgatgccttatgcatcaggcatatattcttatttatgaatatggacctttattatgggtaggaaagaaaagaaaaaaaaagaaggatcaaatatgcccaaataccaaagtagcatgaggtccgatctaaatccccggctatgcatccttcagatcaaggttggcgatcctgagtgaagcgaattcgaagccaaaataagcgaaaagggcgagaataccgcaaatggccctgtcggccgtgtcttggccggtttaggccctttgcctggcactcagtttcgccttcgcttaatttgcactccacttgggtctcgcggatgcacccagtccctcttggcgtgctatcatttgattgtatagccatataaaatgtacctggtctctctccctgatcgaccggatcgccctgctcgactcctctaaaacttccccgaggtcctctaaaaagagtcactttccctcctatgtcggagcccttgcaactttattattctcgtcccctttatcctattgctcttagttaacgactaacggaatgattagaaatggtctgacggtcttacccatccagggatccccggtgaaattacgtgctgaactgccggcgaaaactctgactatttagcccagatcgtgccattttcttcatgcgacgttggtagaatccaaatattattctctttctcttccgtcatcatccgcagacatccaacctggggaagccaagtcatacatctggctccggattattcccggtctctctggtctgattttctggtataatcccatataatccttttgttccattttcaacttctcaatctctcaactctgattcttgcatttattatatttatatactttgaacccttgaatccttgaatatctgttatgttgtctccggtgccaaatcccgccgattatggaatcactgccgattatggtttcctttccgcagaacttcctttagaggtgctccccgatccttactacgccgaatgggagatgataattggcaatctccacccattgatattgagcaaacggctgcattcggtcgtggacactctgcctatactttcggccacgcacctgcagacggaggctgagtggcgtcgtgcatatgtcatactggcgttcattctgcacggctatgtctggggtggcgattcacccacagaggtaccggcccatcctattggttgaaaaagtagatgtactgattctttaaaagaggattccacctcaacttacagtacccttatttgaagtctgtgaacgactcgaattaccccccgttgcaacatatgctggagtctgcctttggaactacaagccgatcttctccgatgagccagccaccagcctggataacctagcatgtctacaaaccttcaccggatctctagatgagcaatggttctacctagtgtcagtcgccatagaagcacgtgggggcccttctattcccctgatgattcgggccatcacggcggcccgcacaggaaacagccagactgtcaccgagtgcctgcagagactagcggaaatcatcgatgagaccaacacactgctacagaggatgtatgagaactgcgatccatacgtcttctacaaccgcattcgtccttatctagctggaagtaaaaatatgtgtgatgccggattgccaaatgggctgttgtacgacgacggccacaatcccgagtaccggcaatacggagggggcagcaacgcccaaagctcactcatccaattcttcgacattgtcctcggagtggaacaccgacccaccggtacaagtcgcagcgacagtgaacaaagccccgaagccagcaccaaatcccgaaacagcttcatccacgacatgcgcacctacatgcctggcccccaccggcgcttccttgagcatatcgactcggtagcgaacatccgctcctttgtcgaggcgcgacgcggagactcggcgctgtgcattgcctacgatgcctgtctagccatgctgcgcgtgctacgtgataaacatattaccatggtgtcacgctatattatcttacagtcccgcagctcacgtcagcctgccaactccaactccccagcagcgacgaatcttgcaagcgccgctccgaccgacaagaggaagctgcggggtactggtggcacggcgctcatcccgttcctcaaacaggctcgagacgagactggagagcctgccattgatgcctgggcacgacggttgctgagcaatggccctgcagataaaaagttcgctgcgctgagcaaggttggcgagcatgcggatggtcatctggaggttgtcggtctctgtggcacatggacagctgaggaaaacgagggtggaatttgtcactggtagtcgtataactagtttcacgtttgcgtttagtcttccttcgagcgtggcattgcatgggatttatgccgtacgcggcgactggtgtttgggaacttgcatgaacttatggttattactatgctgtataaaatacattccacctggctgtgagaaagataatgctttttttgtatggactatattgtacttgtacccatagaccacactatagaaattatctttcgatacccctgtacgaatcatcaacattcatcaacattgatgtaatgacgcttgtccctggcctgaacaaaactcgtcatgcacgcgcgtatacctgatattcacgtgacgtgacatcatccaatgacgtagttcatcacgataatggtggactttgtagaacttcaatcttggaagaccacattggcccattggagaatgccctggaacatgtggcttgataacaaaatgccttgtgtatataagtggccttcctgccacgactctcagtaactaattcatcaaccacttcaatcctcaaacatctctcatatcttcactaccactaccacttccaaccatcatcatgactaacaacactggcaacgcctcgaccaatgagtcgtacctcgagcaagcctccgatcttgcttcgcgcgccatcggaaccgtgactggcaccaacacctccactcaggtaagcaatccactttaatcccaacatcatcccactgtctacaacaactaaccctacctcagaccgacgaacacaagcacgaagccaagcgagacgatggatcctgggaccagaccatcggctccgccaaggagtccgtcggcaacctgatcggcaaccagaccctgcgccgcaccggagccgagcagaacgccgccggaaaggagcaggaagccaagagccagctccagaactggggcgagggcattgagaaccgcgctcagggtgctattggatccattggtgctgctgtcactggtaaccgctccgaggaggataagtaccgtgacttgcatgacgagggaaaggcccatcagctcagtgctgaggctgatatgatcaagaagaatgctgcttaggcttgacttgagatgagatcttgagtttgggtttttctttggtcgcttgtttcattatctttctttggtcaggcctgttttattatcacgacttctacgatatgatatccaattgatgccatgtttttattttacttctatcttctgcttgtaacagtgtatgatatatatgtaacgagtcaagttttataacgccatcacctaactacagcacgctttacctgagaactcttcctctttctctatttgagctatggtaattaaggcacaggtctcgatacatgtgaattctacatggatcgaccgcagatcatccagcccctctatgcaatgctacatcgacatcccctgcatttccccgcaaagaagtaataagtaatttcccgaggaccagacagattggcatctgattccgaggctggagaagatctagaaactcggaattttacgaattaaattagcaagctatttggggactaattgtatattccatgccactgtagactaatgcggagagatcttagccaagcaggttaagcatttgatataccgactctgccccatctgagtacctagtctgtataccttttgtctctttcttctctgcacttgacaaaatgaaattcacgacagctttcctctttgccgcaacagcctggggtgttcaacaccaccaccgacgagataccacaaataacggtatcaaccttagtgcaatcacgagcgcactgtatgtgactctttccctgaatatctttcaacccactaacaatcccacagtgagaatctaatggccaaccaaacagccagcgcgaatttcgccaacatctcgccgccgcccaagtcgctcatccccgagatcctatcagtcgtgcccgtatccgtcatctgggaactcatcaacccagcggagcgcagttccctcgccagccaattcaaggccggtactaccccagcctggtacagcgctctcccatcggatgtgcaaagctacatgtcggtggtcaagtcgcagatctcggcgggggcattgacagccacaacgtctgagatcaacgctgtggcaaatacagggactgcagcgactgttacagcaacagcctctgtgaccggtgccactgctggaggattggcaagctcgacttcgtcgaagggtgcggctgcacagcccacgggcctgaccgtgtcggcgttgggggcgctgggtgtgcttggactggcactagctctgtgatggaaggatctacacgaattgcgtactttttacggagtaaatacgattgtgatgagagatgttttccgaaattcaaaagattggttccgtttacacgtgaattcgagtataattatttccttttcgcttatcttttctatacaatgcacgtatggtggagctcaagatcgttacattaagcacatgccgtcccttttcttatagattgaatttaatatagaagtatgcaaatggcatcatggtataaagtatatgcagggttcttttgtagacaaaagggacagcctttgccgatcactactaaaccgaacctctcctccgaggttcagggcaggcattgtgagacaagcaaatgtcgctaaccccaaaaaagggcaaaaaagggatctactcgacgatcttccactaaaaggcgacatcttgaggggagaagagacttgcggggaaatgctcgtattggattctcttcttctccattcgccattccttccatgtctctcacatggcattgcttatccctcggcctcatttaacatctagatcatatcgctattagcggcctcggacaatttccacaaattacgctaatgagagttacatctacagaaaacagaccagcctcctataagacactggatgtgtttgcctcttcttctctgctcaatcctcacttcaatataataacaaaatgcgtttctctcggatcctgttccctttggcctttgcccccttggctctagctgctcccgagcctcgtcccaaccctgtcgctgcgccagccccggccaccactggtggtctactagaggagctgcctgagcttcttagcggcgcccagagcctcctgagcaccgataacatcaacaagttggatactatcctcgagggtgcggccaagttgctcgctgccgataatatcgatatcttgcaggatatcttgacgaacgcccacagcttgttgaccaagagctttgtcaataacacaactacgctcattggggatgctacaccggtatgtactgctttttttgcttttgctttctgaactgtgtactaatgtaatatagctggtcgaggatatttctaagcttctgggtggtgtgctaggatcactgtgagggttgataaaaggaatgaatcatgataatcactttagttatctttttattgcagttatagcatctcttgaatgggtgtatgtaaacggaaattcaattgaaaccttcaaaatacacaaaacaatcatgtctttcataacgatcgggtatatacagaaaaatattagactagaacacagaatcacactcaaccctccttcctattcatcttctccttgagccgatcctggtagaatctcaaagggtatgcccgccatttatcaggcatagccggataaagagcgaccgagaatcccatccaagtacgataaagagcccgagtcttaaccgtcgagcgcagaccgtaggcatcacgcagactcggaggcagcatctcaaccgtaatgacatgcaaaaaaggcttcaaagactgcacccagcgcggcatatcatgactctcacgaagatccttagcaaactgagccgcatccgacgagacagtcaaccgatggacctgatcatcccagtaagaccagaactcctgccgggattccggccacgtaccggagggaacgcccagacagtccatgagcaaggtatactcgccatatgcgcgctgagcactggtgtagtccacacggccgtagacacgctggtagaaatcggtcgcagtcgcgtacagcgtcgccgccatccacagctgcagcggcgggtgctcagcgaatcgattcgagcggccgcctagcaggggcggcttaccatcctgcaggaggtcgatgaggactttgcgctcgtcgcgggtgccgaagaccagacaggagatgtagctgatattggcttggagagcgtcaataagctccgtggctagctctttgtggccgccgtggttggcgcctgcgtcgcggatgcccggcatggcagcttgtagtagtagcgtcgcaccggatcccgcgaagaggatgccctcctgcagcatttttgggaggacctctagttgctctagggcttggagccgggatgagacgttggtggtattgcttgcggtcgcatcggagccacgtgggtaatcttgggatttctcatccactggggagacgggaggtgtagggaaagacatggttagagagttgtcgacagttgtcaatgaagctatctgtgagtatatgatcccattaatattgaaatattccaatgcttccccagaaatcccccgcaaaaccccgaaaatgctccaacgactaaagcgttgatcatctcggcccatgtgaatagtgtcgtctttcttagaataagccgcggctggcagcagatcgccatctcctgaagcgctgatccctcccctcttctgcgttattcaccaaagaaagcaatcctgctccgacgaggagcccgctttgttcctttttgtctttttgtcttttttttcttacccacggggtcccaccggtgcatggagaggagacgaagtccgggggtgctttgcgctaaaatacatatacgcagaaccttccccttccaaggtcaattgaaattgtgcgatcatgggtaaaaatacagatacaccagcatatctgacttcagatgatgccaaatacactctgggtattcatcgtggcccgttgatatccaagggcgatgaaggcgcccagctcgcacatgtcgagtcagccgggggtctgtcattagagacgaggaagctgaagcgcagtgagaagttccaacgccattggaagcgattctggtgtctgcatcttttagtgactgtcatcttcctggcgattttcctacctgtcttgtgagttgcaagtcctcctgcgaataccaaacaaatactaattgcaatcagtttcctggttgccattccagccatctcacaaatggtcgtcaacaagtccgacctagtattggtcaatgccgcagtgttaaatccacgaccggacaagatccaattgacgctgttgtcggcattggacctcaaaatcgcactgccagtgcgcattgatccgatcacgttagagctgtttgtgcgtgataccggcgcagagaatgcctggggccaggctgatatcgacggcaaagtcgtcaaaggcaacaccacgctaggcgtgaccaaggtccagacgccactgaccaatttgaccacctgggaggagtacgtgcacaatgtcgtgtttgagaaggagactgcgctgtcagtcaggggcgtaaccaattcatacttgggtgtgctcaagtccaaggtcactatggacaagaatataatgtcgccaggtaagcgaagaaaaataaatcaccctagaagtgaatctaaccccattagtgctggacaaattcaaaggattcagtatctccaacagcgggctcgttccagcccgcaaagacggcacaaacctaatcgggaatgtctcactccccaacccgtccgtattgactctcgatattggcacgctcgtcctcgacgtgaagagcggcgacctcgtcattggaaatgccaccgtcaaagacgtcactatcaaaccaggcgacaatgtcttccctctaaccggaatcctcgacatacacacaatgattgagcacctcggagaaatactcgcgtcgcagacaaaggccctaacaaccggaaacttatccttggatacagtaacccgaaccgtcacctggaacggcacgctggtgccatattacaccaatgtaatgaaacagctaacgctgacggccaacgtgccaatcgccgatcttgttaagaacacagttcagaatctgcttagcggcaatgaaagcctcaccgacattctcagctcagcaggtgacacaagtaacttgctcggcaacctcacgagcagcaatggtgacagcgatacctccgagctcgcctctaagatgaaaacgagtattgctgtgcgcgatatgttccataacacgcacccggttaaacgggatctaatcatcaactcgctggctgggatgtacaagaagctgtgagctgccgatcctatttcatttggatttttcctatttttcctatttttcctatttttcttttcggcatttgctttttctttttcttgtcgaaagggtctccggttctgggttctgtgtacatggttgcgcgatgcttactgatgcttatatgatacttgattcccctttgggttgtggcagtggtctttcatctcgaatggcgttgtgggagtgtattgttgtctttctctcttgagacataaagaggggtcttaaagatcttgtttttcctgtcgactccatttctgaggcagtgcatcggctctgtatactccgtacatggctgcctgttcgggctcgggtcggtgcagatgataatacatgaattataaatcaaatgacgatataaatagatggtccttgtgtcgttagacttgcatattgtttcactgcaatgggcagtcagcttgacaaaagcaccgagcaggttgccaattaacttatccgaaaagctgtaggtcttttagttgctgaattgaatgtattagaatactaatgggtccactctgtagacgtcaacctcagacgagattccagttctggaaaatcttatagaatggagcacatatgcatctatggccgtggttccggatccagggcccaattgactgccagtcatgttcgatgataaatcataaacgatgtttgctgcccaaggcgtcctggatacccgagttgaccgagtcgtcgtcttgtttagtgctgaccacctcgtatactaagtttactctgtgctgatttaaattttaacttggttttgttaacattgagtgtgggtattgacctatcgtcttgtacagataatcatacctgaccggttgaatcatggaacaagccccttccaatatggatcccttatcccacgtaggtagtacccgcgtctgatacccaggaagaatggtggtgcctcttccaccaaattgcgcgacggaaaatacggaggcggtggcttcagcgtctgtgggaacagttcccggggagcccagtgatctgcgggagaggtagcagtaggaagaggcgtagtaataggaagttgaaaattaggatcaaagctaatgaggacaagagcttgttgattagggggaagacccggggcgtcaatcgagtatataatcgaacggtcgtctgcaatgcttttcacagatccagtacgcgggcctggacagagcaattgctgtaatgcaggcggagcgtcttctggaggccacatgtacacgccacgacattcaaagcgttcctcggaaccttcaacaggataaccatcttggtccacctgggtgggctggaacagttggttgcgaggtccctcaattccctcctcgtcaataggacatttgcgcttgcgcgacaccgtacgcaaccgaatccgatctcgagaccgtagattatcaccgacaggatcgttaacaatatccacaaagctggatgcaccgagatggtaactcttgtgtttggtgcgagctgcgatgaactcctgccgcatggtagagccgggctcatactcggcatggtaatgccgccgcaacctcttcgcaggtcggtcatcgtaggggtgctctgcatccatagatacccagcaaggactttgtgtggcgccttctacaagaggcgctagagcttcttctggtgtgggaagtggctgtgtgtagtatgtacggtggttttcactcttgccatcacgccactcacggcgacattcaagtatgactgggcggccagtcctctcatccgtgcggattgaaagatcagtccacatctcattgatcgggccttcttgatgctctcggcgccacaggcgacctttccatctgcggtattcatcgcgaggggcttggcagaaccaatagtagaaagaggagtgcacatcatcgtctgcggcgtcctgcgtcgaaactgcatagagatattcaccatgcatctcaaaacacagtgtttggccaagatcgccagcgaccactcggtcgagttcgaagttaataccttcatacgattggagatccacaccagtaatagaccacgaaccctccgcggaaccatcgccggccataaatatgccataccagatgtaggttccgcagtgtcgcacaaaaaccggtgcggatgctgggattggctcatggagtaggaaccggctccgtccctggtggtattcgcgccacgccatgttgaccacgagcaatgcgtcctcggtcgcgttcgcatcggccactcggaagatgagaatgtcatcgctgtagctcaatagcgtaacccggtcctctgcacccggctccacgggaccggtttctagcagccgtgggatcgcatcacggaggtccatgacacgctccctgaataccgtaccatgtaaatacagcagacggatccaatggtcagaacggtaacataagtggccttggttgtaaagaaactcggacccatagcctacgcagaccgccgagtacggatttgctgttgccacagcctcgtggatcgcaagccgatgcccaacagcctggcgaaaaccggactgggccgcgagggcagcctgaccttctttgctgtagcgaaaaacattctgtaagccgggatcagccttgtaattcaagcgaggggctggcttggcttacctcgacggttttgcgggcgatctgttcacttcgcgacagatgatatagggcacggctagtgcgactaaggtttataaaatcacagtcgtccagcagcgttgcgatctggtagaacacatcatatgaaagagtgtccagactcatggctataagtgccaaatagtctgttgatttaaatagtctcaagggagtgtctcagacagaagggcaacagccataggaaaggaaaaataaaacaaagtccatatcgaaggtcataaggaaagaacgagatttatgtcagagagaaagaagataggaggaaagaggaggtgagaggctcaagtcatgaatgtcctaaagaggaaagaacaggcccacatgaaaaccatggaaccccttcgtacaaaaccttggatgctggcagagcctcaactagaccaaaaatggaatgacaaaccaattgtaaccttggagccttcctcgaaaaacttatcgccatggcttttacagtaagaaagcaaaagcagacatccccggatcacggagcacgcgatttggcaggatcggatccttgaggctctgtttttgttttcagattacgactaacatctccgaaagaatgcggctcatccgtctccattaggactaagcaagtgccggatctctcgtaacacgggttaggtggggttcgcaggtagccaagaatcttcagtccttggtcctatcggatctccggtgtgtgtgacctccgtgaataaagcgccctggtaatatccatggatgggctatacgtatacttcgtaagtgtttcaaggtactgtaacttgacgcatcctacatcatctagttatgtaattgtacagcgccccattaaaaacgtctctcgcaagccacttgggggcaaaactagtctcacgtacgcattatgcatgctaagttgccccggtctattcttgggcccctaccccgtagttcttcctacttctactcctaaggtttcctattgatgtcggaatcaggtgacgacatgcatagtcacatgatggccgaaaagtcgctgcctaacttacagcctgaggctgctttgtttcatgattacacattagattacgcagtacaacgcatggtacgcattactagcgaggagggccattactggagtcattcaagcgaattaaagtgatttacctgcagccctaccggtggatcccatatctaccaatctccaaggagtgttctttgtatagtccgtacatgaattgcccggggcacccaacacttgtcccaatgggaaagtgaaaggtcccatctgcgtgtgcgtgacccacccggccagccggattgcttttaaactgttcaacttcttcgtcttccttttcctctcttccatcaggagattataggtcgcatctttgaagagatgaattatccaccgaggggtccacctccaggacaagggcctcccccatggggaggatatcaacaacctccccaatggcagcctccgcctcggccgtatcctcctcagccctacggtcatcgaccccaatcatcttattcgggtcctggtcattccccctacccatcagcttatccccaatctcaacctcagtatccgcaccctcagtatcctcagcctcaatatcctcagtatcctcctcaatccccgccatacggccccactccacctcctcgtcctccctcacaccagcatactctgagtgccccgcagaatggtaaacttctatgccaagaacccttggcggcgtcactaaccgttgacaggatatcctcgtccaaactctccgaatctgcccccaaccccaccccataattctcagcaatttggtggaggtgctccctcgaactacaggttccagtactcggattgtaccggtcgccgccgggctttgttgatcgggatcaactacgcagggcagcccaatgcactcaaaggctgtatcaatgatgttgctaacatgtccaacttcttgactcggaggtacgggtacaagcgtgaggacatggtcattctcaccgatgaccagcggaatccgatgagcatccccaccaaggcgaacataatacgcgccatgcagtggctcgtcaaggacgcccagcctaacgattcgttgttcatccacttctcgggccacggaggtcgtactcccgatctggatggagatgaggacgatggattcgacgatgtcatctacccattggactaccgcgtcgctggccacattgtggacgatgacatgcatgccattatggtgcgtccactgcggcctggcgtgcgattgacggcgatcttcgattcatgccactcgggcactgcattggatctgccgtatgtctactcgacgcagggcgttctcaaggagcccaatctggccaaggaggccgcccaggacttgttcagtgcattcacttcatatggacagggtgatttctctggtgtcgcttccaccgccatcgggttcatcaaaaaggcagtcatcggcgaatcggcccgtgagcgcaccatcacgaccaagacctctccagccgacgttgtgatgttttcagggtccaaggacacacagacctcgtaggtggcgttttaaaattaaaattaaggcagataagaatccaaactaacctcgaaacagggcggatacattccaggacggacaggcgcgtggtgcattgagttgggcgtttataaaatcactggaacagtggccccagcagagttacctgcagctgctgaacacgattcgaaatgagctcgagggcaaatactcgcagaagccgcaactcagctgcagccatccccttggtaagttatttttcagcggtgtgacccgcgcccctggctgactggagatcgacagaccccaaccttcgctttgtgatgtaaccggggatttttcatccgagctgttatgacagacatgatcgacatgtagcaaatgaatcagctgagacttccgactcccgagttccggtgcggggaagagcctgtaaccttggcaattgtgtagtattgtagataatatgtactacctgatactgcggaaaagaatcgaaaagaatcgaacatgatggaaaatatatactagatgtattgtacggagtctaatatagtgcaataatagcacggaatacggtgcgcccgcatctcccaaacgtgtgggctcgtttgtggctgtggttctctctcctgtgcctcagctcggtggatctgcaaactcaatgggaaagattttttttttctcaagagcaaacccaaccaacatacatagacaatataggtaactattcctcccaacccttccctatctaccagtaactgtcccatcccaatgcctgatgtctaatgtctcacgtcaaggttcaagcgtttctatagaaaagtatagaaccatggcgccattacccccctgagcggggatcgggccaatcacaagcccgcaatccccagttcccggtgggaaccgcggacgcactggctctgccccttgggaaatgtcgcaactcgctatttttcgctttcgttgcgtatgagcgacgtgttggaatgggatacttcacgcaacgacctggagaatgtccgttgcacacggtcttacgaatatcgtggctttggtcagccgcgtcacattgggatcgaagacaacgtgttgccagatctttgagacatgatctgatcaccccacggcggttttttccacatggatggaccgattgtactgtttatacaacacagtatacaacacagtatacttcctatagttgtatgagcaaatactatgtactcctatactcctagtcaagacctactcgaatctcatattcagcctaataatataaaaacaaaacaaaaattacaagtcatctaagtgttaccgaactaaaatgttgatgtctctctgatccactttcggtctttttcagaattccatctgaataccctttctgctcgcattttccctcttcctcttatttccctcttcctgcaacatcacagccttctgccgccatgttgttaccgtctacgaacagttcctatacttccagcgtctcctccgagccgcatctctccccataccaacatccgccgacatccactttttcattgaactcccgccgaaccccaatgactgtgaagtaccctcgcttctactcgtcccccatggaccaagaaaccgacgccaccccggtacaaatctacggcctggagcagcgagaaccctccatccacaggggatcccccaaactgctcagtcgagtctcgcacgtcctagacgacatccgcgaagacctcgtgatagacgctcaccaaaccacggagaagctcaagcggtactcaaccatcaaccacgacggacacggtctcagtgctcccccgactcgcccagagggcccgatgacatcccacgggcccccgcggtcgcggccaatgtccatcatctccttcgacaactggtcctcgccgactgggagaatgagccggctgtcccgccggttctcggtcttctcttctcggaacaagctcaatcgctccaaggaagctagcatatcttcgccaaatctgatcggttcctcgactcagtacgaataactggaaattatcatatatgatcatcatcaaaagagagcaatttcagtccccatcggtgatcatggggtcgacgctcgagccgtcgtacattgcacggctattcatacatacatgcgcaaggggtgttccggtatactcattcttcgtttttgcacttgatgttttttttttttttttctgcgtcaatttttgcggtgggcagcgatcattttcattttattaatatcgctagttcatgtgttgaggttatgtgttgtttctacttccctctgcttgacttgcgcatagctcggtgtttgggattttgatttttggccttggaatatcgattcgcatttccccccccccccgtccccttgacatatcagaataatatactgagtatcatatacagaaccccttgaaaactaaccctgccctcgagttcaataaaatataacgctaattgcgccaccatgcatttcccaagctaagcaattgccggtagactaacgtcagcccgttagtcaatgcctaaaaataaaggctggaaaaagtccgagatgacgtattttaaatccgaccgctctctggatctaaaacaaacgcctcgaactcgcactcgcactcgcatcgcataacgtacgtacccgggttttctgcaggctgtggagaataccgcagatgcgatgccatgccaagatgggaagaatgtcctggacgatgcatggtagattggctgctgggtttggaatggtcctgcattgtcgtttggggctaaaagaagaatggccctaatgacaactagcgttggacagggatgcaggaatagactgggatcaaaattaaggagtaagtagatctctgcgtctggggtgggttcgtcgctatttactttcgatactgtgtcctttgggtgtgcattgatttctgaaacaactagctgctattattccatacatcctctccactgtactactcaatgcctatcatcaactgtctaatactcactgcccctctccctcgatccattccacgtgctcgcgctctgctgtctcgacaggcataacccccttactaacagccattctctcgaactcctcgtcttcacggtcaatgtatttctgcgggcgttttcgacaaatggtatccggatctccagtcacaatcaacgatgggttggtgcggtaataggcatcaagatcctcaagactccggttggctacaataacagtgagtaagaggataacatgcgatagctctgaacgtaacagtctccgggtagaagaagtagaggataggcaggaaaacagcattagacaccatccagacaatccaaaacttccacccaatattctaaatcccgatcggggtgatctccacaacgatgaagttcgtaatcctatatttgtcaaaacacagccaacgatgtaaccacaccacccaggcaccccgtcggtataacatcaattttctcaacctttgggcgcttggcacggttaacaccaccaacccttgaaaaataggcagagcttttcatttaacgtaatcggtaagcgagccggccatgtaagccagccggccacccaacccaaaaggcgtccatgatttagcacttagttagttcaaccacccactatgccaccaattcgctcccaatcctctagaaattcaatagagtaagagggtaggattctcttagctatttaggcttttaaaaataaagaaatctcttcaattcgcgaagtagcgcgccgttttaatgtaccacgtttaacgcttcaagaccgattatagggccactaaaatcgcgcgatttctcgcgtaaatttatctaaatcaacagaaattaaggaggaatctcttgaaacatagattctttctatagatctacgtgttttgctctccgagttagtaaacccgcaatatgaacaaatgatttcgtgccttctgctcttgatgaaaaaaatatccttggggagaaacctgggagctattgaaaacggatgtatataaatgtgtaacgtaattctcatcttttggtacattaagcgcatttggacaggcaggctggttcttcgtacagctattctcgcacaaaagagtgccgagatcaaatcaggggttgctatcgacactcaacgcatctgggtggttgatggcttataccgtaatatcgatgaaatcgtagaatctagactccaaagcggaactcccgcaccttcttctggtagtagaaagatgctaacaacccagtggcaccgagagccaaaggcatagcagccctagcctttgtcttaataatcctagggatcgcagagctcagaaggaggatgctgtttcccagggcgagctcagtgccgtagtccttgttctctttgatcaaataacctggtaacatggtcagcttcggaatattctggcacacccatggtacttaccggaataggcatatgatagaccgagtccaacaccggcaatcaaagaaggcgctgaccgcgttcgtagaaacccaacggtacctccgataggcactactttggtcagaaatatagcaattggtctcgttgcacggacttacgaagagctgcaagggtaaatgaaggatgttcggccatgatagttaagtacttaaaacaatgtagttgaagggtctgatgcttcaaaatttagaaagctctcaagtgccaggggcgcgtagatcccgctggggccgagctccgatgagtcagcggaacacaggacctgggaccatcgtagagaatcattttgttaacgacagccatttgttattgtcaattctctaaatccatccagaatttatggattaatcatacagtagcatcatcattcactcttatatactgaccgtaacattaatgattttatactttgattcagcttgggatctaggaaggagctgttgtttcatgatctccatcaccacgccactcgcgtatgtcacttgcctcctttacattctataatccattccattcctgtaacaagcacatacgaccatagggtgtggaaaacagggcttcccgtccgctcagccgtacttaagcnnnnnnnnnnnnnnnnnnnnnnnnnnnnnnnnnnnnnnnnnnnnnnnnnnnnnnnnnnnnnnnnnnnnnnnnnnnnnnnnnnnnnnnnnnnnnnnnnnnnnnnnnnnnnnnnnnnnnnnnnnnnnnnnnnnnnnnnnnnnnnnnnnnnnnnnnnnnnnnnnnnnnnnnnnnnnnnnnnnnnnnnnnnnnnnnnnnnnnnnnnnnnnnnnnnnnnnnnnnnnnnnnnnnnnnnnnnnnnnnnnnnnnnnnnnnnnnnnnnnnnnnnnnnnnnnnnnnnnnnnnnnnnnnnnnnnnnnnnnnnnnnnnnnnnnnnnnnnnnnnnnnnnnnnnnnnnnnnnnnnnnnnnnnnnnnnnnnnnnnnnnnnnnnnnnnnnnnnnnnnnnnnnnnnnnnnnnnnnnnnnnnnnnnnnnnnnnnnnnnnnnnnnnnnnnnnnnnnnnnnnnnnnnnnnnnnnnnnnnnnnnnnnnnnnnnnnnnnnnnnnnnnnnnnnnnnnnnnnnnnnnnnnnnnnnnnnnnnnnnnnnnnnnnnnnnnnnnnnnnnnnnnnnnnnnnnnnnnnnnnnnnnnnnnnnnnnnnnnnnnnnnnnnnnnnnnnnnnnnnnnnnnnnnnnnnnnnnnnnnnnnnnnnnnnnnnnnnnnnnnnnnnnnnnnnnnnnnnnnnnnnnnnnnnnnnnnnnnnnnnnnnnnnnnnnnnnnnnnnnnnnnnnnnnnnnnnnnnnnnnncgccggtgagttagtagttgggtgggtgaccaccagcgaatcctcactgttgtatgtttttttcgaatgctatttatatagcaatagtcattataatagaacggtaaaatgcggtgcccgtttgagttgctgcagcgtcattcgcttcagggttgcgccgtaggttgtagcaaacacaaacagtttgccctgacgcaatcaatttcaacttttttgtgcttactttatgttatggtgccgcaagtctccctaatcgctgatgtctgctgcaatagtgcctttgacctttgaagtgcctcgagcgtatggttataaagtatgagagtatatgacccttctcgatcaaatctctattctttacaaaaagaagcaattcatgccaaacattaaatcattcttttgatattatagttataattcgacaatcatggaaaatcttcccactactgcgaagacacacattgtccctgccgcccaaggctacgtatttgaggttatgaaaggggagcgattccgcattgttgacatacacggtctccaaattgttgattttatggcttgggttaacgagccaggcctaaaagagcatgttcggatgtcttacaccaggttccgactgcaaggtgtcagtcccgacattggggagcatctccgcaccaacctcgacgctcctgctctgactatcattgccgatacctgcaaagtccacgatatgacattcatgccctgtttcccggagatctatgctgaatgcggtctggaaggtcatcggtcctgcgcaatgaatatcactgaggccatggagccatatggtattacttcacggctcgagcttcctgacccgttcaaccttttcatgaattcgcccaattacactttgaagcctatcagcaacagcaagcccggagactaaattgagatggaggcgctgaaggacttgattatcgggatttcgtgctgcccttatgatcttgtgagtcttctgtgatcaaccgagcgtgaagctcaagtatactgacctctcattttttcagggaacctacaatggagacagacgacccccatcgcgattattacagggttgtaatgagtaccggtgcagatcacccaccgagtggaagtataggctctcattggctacatcatcatatccaagagccccatatcatactaagttgatcctacgcaatgtgacaataatcccgaaataattgactggtgtaacctgtttcatctgcatccctcgtagaaatcagtctaaacaaatataacgcgcctataatccacacaaaagccttaccataatcaatgttttacttaatccagcgtccttagaataaaaagcccacaattgcagaagtccggaatctttctaacatttttaacgtcgtctaatagcagtaaaatctcgtagcttatagacatataaagagtagagaaataactgtctagcactttttatgtctctataagtgaactatatggaaatctttccacttatatatacaatttcctgctcttcttactctcgtcttttaattttagtaaggtcgtggtacaatatataaatgtcatgaagatagcatagccgaagatcaatatcccgataactgagaatctgaacacctagttaattaaacgtggtattagagaagttttaatctaaaatcttgattcaagatgtcttttttgaacctctgttttaaagtcttttcagatgctcttttattattttttggatacctttacgtatggctttttgatggatttttaaatgcctacaaatatctgtttagaaaaccagctgtaaatcaattaacattaaatacatgtttcaagtgacctgtttccaagcagaaacgttcttcttcacaaactcctcccacgtagtaggcttactatcgagaaggctcaggctgggctcgaggggttctccgaggtagtagccaggctcctccacaaatagctggttctcaaggtactcatcagcgatagcagcaggaagggaggccttgtattgatcggaagagacttggacgaagacagccttcttgccagtcaccttggagaaggtgtccacgatctcctcgggggtgtagtacttcgcagcggccaatatctgcttgtccttcagctggccagcgtgctttatggcagctctcacgaagagacctaggggatatgtgagttaatgcgtataaaaaaaaaagaggggagctaggagaggtctcacctgtatcctgggccgcatcgaagagagggaattgagcctgctttcccaccgggtagaaaagctggtatgacccatcctcagcacgactgagcatctgggtgaagttgctcatgtagtaaccgggaaggacaaagctgcatccaacgcccgaagcacgaatatacttctcgatactggctttgctatcgaaatgaggcacatggctcaggcgacccttggtctcctccgtaacatggtggagagatgagaatatcaggtgagaaacaccaatagccttggagacatcggtcacattcttgccctgggagaactcaatgtcggggttcatagtctcccagtagttggtgacgaggaacacagtgtgggatcccttcaacgccgcagtgagagtgtcgactgagcccagatcggcctatttgaatgttagtctctctacctatgataattattcacaaagacaacaaggaagtgaaaagagtaaaacgaaataagaaatcccatcttaccgagacaacatcgacaccgcgcttggccaggtcctgtgccgatttcttggtggtgtcgcgggtgataccccggatcttgaattccttcgagagctgggtatcggcgagaatggcgtcgatgacggaaccaccctggtttccggtggcgccaaaaatagtgatcaacttagacatggtggataactgatggatttagcttggagaacagaggaatttgggcaataacacagtaatctattctcgttagaatattgtatctcagttgcgtctggtgttcttatttaccgtttccaaggctataagggatgttagaagatagtaaagtggtttgaagagaaggcttaccctaagacgatccggccaacgaacatctgcgccagactgaacgaactcgcctgaagaatacctcccactgccatgatcgtagtccccagcaggatagctttcttccggcccagatgctcaccaatagtgaatgcgacaagcgctccgaagaaacagccaatatcatatatcgccgtcaccgtggatagcatcgttgtcttcgtaggcccgaccagatcgtggacttcaagaaaatcctgtgtgatcacaacgccgcatgtattgaaatcagaggttaattcaagattgcatagtctccagagcactcactgaagactccttggtcgtaaccgaacaaggtcatatcggttgcgcatgccacctaagacaaaacaagtcaaattgattccgatcaaacactacagatacctctagtcataccgtaatccagaaggtcagccatccccctgttaacccgaagtagggctttttcttctgcgcgacggtagtcatatcgtaactaactataaagaatcaaaggaatggaatctccacaccgtgcctacgtagaagtgaaacttcatcctttatatactagtctcgaattaattatgtatgtcttggatgtatgcaagggatgtgtttacaaagagatccggggaatgatctcgggtccgccccgaagtccgggggaaaatgcggggagaacttccgctggaataaggccgttaacccaaaagggtatcccgtgggacctgatcgtctgggatttataccgcatctagtagattagattcgttcggattcaaggaaagattcttacgtcactgatcgtctggggggtatgtcatttcggcattggaggaatatcgtctgctataagtgccttttatggactaatgaggtacaatcctaggaaaagcacgtaatatgcagatcaagtcgactgaaagaggtatacatagatagtgtatagtggaaccactttttgtgtacgcagaccttatgtaggtctccgcctccgctcctaatccctgatgtccatggcacgtatttttgaacagatgatattgcatgcctcgtgagatggtataggggccatgagccagatgaaaaattgaagcaccaggaaacaccgtctgaaaacaacaccagaatcaacctgcaaagcatccgacggaatgcaaacttgaacgcaacaagcttctgaacaagaaggggcgtccgcaaaaattcaaaataaaccaaatccacgtataatacgctataataatcccaacccgacgtgtctagaacatggagccagtccatgcagctcggagacgcacgtgcggcacggcatccccatctccgacccgggtcctgccctatctataaacctcaatcacagagtcacgctctcaagatcacgcatgacaatacccatctgagcgcgcttggctgcctcagcgacaagactgaaatcctgcaggaagggcgctgtggcagttgggcccccgagaccgtgtatctgatgggggtaggcatcggatgtggacgccgaagtgggggctgcatatgcatgggtgttggctgcgggggcgatgggcaggttactcgagttggatgtgttgccgaatgcctgtgacaagggttgcatgggaggggcggaggtttgcggggaacaggcagattggagcgaggatgaagaaaacatctgcctggttgcattcgatgcgacttctagggtattttgattttgagactggcctgccatggtggactggccggttgaatggttgagtgttgaggtaggttgagtttcttgagggttgtagactgttcgcatagtcgagtccatgacgtgactaaaacggtccgatcttgcaagtgcaggaagaataggccgcactgaacgtggacttgggtatattgatagaacggggagagggtttgttgctatggacaaagatgcgatgggagattaagaatggaaaagggagcagagtggcaaggaaattgaagccgcttcgaggatgcaaattgcaggaagctaagacgaatttagatggcgggggcaatttccactaggcagacgatggacgaatggccgaatgatagagacagaagtgatggaagagaaagacttgctgtctaaaccttgcaagacagagatttacacagaatccctcaggggtgcatatgaccttgtgaaggccaactgcagtttttcctttaatcccgagatttgtccgaggtggggtattgtaccgtattgtgacggtatctccacgcttttctccacacaatattacgataccatcacgtgggaatatacacgtgacgtttaattggaacagggtaactactacagttctctgtagagttgtagagtatgttagaacatcagacaatccaaagaacaatgcacatacacatatgaaaaggcccgaatatcgaatcccgagcccgagagaccccgtaatcagcccactaaaccttggaatacagatagtgcctgaggcaacactccgtaccgaggtctacgataagaaattgataactgatactgatattttttcccctccaagcactaagccatatactaccatggccgacgactttgattcagggaacctattccaggacccggaagggtactatcccgaagaggagccgcccacattcgccgagcacaccatgctatcaggccagaaagtgcgcgtccgtctcgtgggcagccaccccctctatgtatgatatcaattgacacgaccagctgaggtgcctacttacagaccttgacagggaaatctgctatggaacgctggacgaaccagctcccattacattgaggagcacaccgaggatctcatccgaaacaaggatgtcctcgaaatcggtgccgcggccggcgttcccagcatcgtgagcgccattcagggcgcccgcaccgtggtattgaccgactacccggatccagatctagttcaaaacatgaagcacaacgcagagttggcggccagtgccattcccgcgagggaagacggaaagccccgcctccatgtcgatggctacaaatggggcagcgatgtgagcccgctgcgagcgtatctgcctcctgctgccgatggctctccgtcgttgtttgacgtcttgatcatggcggatgtggtatacagccaccgcgagcacccgaatctgatcaagactatgcagcagaccttgaagaaggacccgaaatctgttgctctggttatcttcaccccctaccagccctggctgttgcccaagactgagcaattcttcccgttggccgaggcgagcggtttcactgtcaccaagatctttgagaaggtgatggatacggtgctttttgagaaagaccctggcgtaagtcattttgaggattctcctttggattatgaccgtgtactgactcttcacaggatgaaaggctccgaaaaaccgtgttcggatatgagatccgatgggcgcaggatcaactggaggattcatccaaagctgtttgagtcgttggtttgatacttcggcctttttggaacgatgacatgattacatgacaaaagttcgatagatttgtatacattgggatagagatatgttctagaagatatttaccatctctaaatttgcgccaaaagcttcatgttcatggggtcatcgccgtaagtgagcaagccctcgagcttatgtaataatcaggtgattctcagtgagaaagccatctcgcggcctaattcggtgtatatgtagctttgcatcgtgtccgtactagagtgctcagaaatttgcaatttacaatagcctgccaataatattctgcatgataatgcaaatacaagttcttcaagggtggaaggtcgtggatatagatgcgggtcacatgccacaacccccgcaatgataaaaaaagttgtttgaacaaacgcacaagtcaacgatgccggtatgtcgacaaaccttatatattctacaatcaaatctaacatctacacactcagctcgttattttaacggggtacccgtgctccggtctcacctaccgcgccaatcaactcgcatctctgatcgagaaacaccaagatgaagtattcgcagcagccgaagcaggcgcgcaggtctccttgaagtcccgatacaaggtgcacgtggtcgcttcacacgattcctctcatccacggattgtctacgaccatgcccgcaccgagaaggaggcacgcggcgtcgcctacgcgcgaaccaaacgcgtgctcaagcgggacagcatcgtcatcctcgatggaatgaattatatcaaaggatggagataccagctgtggtgtgaggctaaagcggcgcaaacgacatgctgcgtggtacgcgatcggaagatactaaatgaatcgcgacacccaatggctgacaagtctgctccaggttcacgtcgggacacccgtcgaccagtgcgtcgccaacaatgacgcccgactacgccgagatgccagcaagcaagaaacaaaccccaatacatccgatgcgcagacctccgaatcccaagatacccccgcacccgactcaacatccaccgaggacaacgaggaagcctacccacccgaactcctcaacaacctcatcttccgctacgaggaaccaagcacccacagccgctgggataagccgctcttcacagtcccctgggcggacgccgaacccccggtttcagacatcttcgaagccctgaccggcgtcgtcctcccctcaaccgaagcacccaccgaaacccccaccgcaagcctaatcgacgccctcaaatccaccaccatctccgatgtcgccagcacagcaaccggcacacgagccggcggccgtagcgggatctccacccgcgcccgaatcatcccgcaccaagccactgtgcaagcagcggcaacggactcgaacgcaatgtacgcaatggagaagcggacatcggcggtcgtgactgtgatccgcaatttcacgcagacatacccgtcggcgcaggtagctcttgcgcagagcagtcgcagagatacaatcgccattgacgtgcccgagactactattcccatacttattccggctcatgttgccatggcgggaacaacggatgagctcgctgctgctggggggattctggcgttgccgcggctgcagaggctgcggaggcagtggattagcttgcatagatcgtatgtcggtcggggtcatggttcattggcggcggatcagattggagatgcgtttgtgcggtttctcaatgctgagttctcgggtgcggttacggaggctgcggaagaatagatgcttgtgcggtcttgttcattatgaaaagtcagttggtgtttatgagaaaacgaggttacgacttggatacccttcagatctacagctgtacgtggtttaaaaggattgcaaagtaaaaggtcatttgaaagaagatacaagaacgcaagactatctatcaacatgcataaatcagaatccaaccaattgttggacaatacatggctatatctctctttactgtcattcttcttccccttgagacactgtatcccgctttgctgtttcctccgcataagtttcgggtcttttgtgtcattggggatgattttatccatagatctggaattcaggccaagaagctcagaagcccttggtacgaatccagatccccatgtgaggagcagcctgcgatccggagcggatcaacaagctctcgagcgtggggtggagtaccacgcgtcctatccagttcctggccgtaatatccatatctggaatcgaatcgtccttgtccgatgatgggatcaaacgggacaatccttcggccgaagtccattgtgtactcgcgagcgatcgcaccgggttctccatgtaaaagtgcctagccagcaagcacagtctagccggagtaaaaaaggaaatcaagaaaaaaatcctccgtgaagtttgttcgtgtcgttcaaaagaaaaccgctgttctcctccaggacggagggcctacagctccttaacccttcaaggcaatccattgggcatgtgggaaacagcctggctggcctcaatctggcggtagttcaagcccaaagtgaacagttcctggaaaccggcattgaccttctcgtgcataatggtatccttaggggaaatggcactcagctcctcgagcagacgcgagcggcacttgaagaagttctgctcggcgttctggaggtgctggctgaggctagcggaagcttggctggccttgatggagctagcctgggagttgacggaccgagtgcgcttcatggtgggcgccggggtggcaccggtgactcttctcttgcggccagtgggttccttcttcttgatctgaccagcaccgggcgaggtctcgggcgagctgtggcgctcggaagtggcatagtcgtgcacgcgacgcatgtggtcgtaaaggttccatctccgtgggaatccatttcctggaacggcgcgttcacagccctcccacaggcagaggtgggggttatctccatggccatgtagtccgtgagcctcgcgctcgtggcggaacagacaggcgttggaagagaagcgcagctgggcatcgatgcaggcggggaccttgcagcggtatggcttcagatgggaatccaagtacttgctgttagttgatattggttagctgggttcattgcaccaaagatttcatcacgggaggacttgctggtaagcgcatttttgcgtggtgggtgggtggctgcagggtttctctccagtggcaaatgggcagtagtattttccatcgctgtgggtggacatggaataatactggtgctctcgcgggttgcgagcctcaacaccttccttggatcttgggcgggctggctctctcactgggagggtagggaagaaatcgggctcagtcttgatttgttgctgggaaacagatgacaacgccgaacgtcgggatggctttgagggtctgatggtcctacgatattgtggttaggtttccgatcacatttgtattctgggtgtacctctttctgacactcacctgtggggatctctgtcgttgatagaggagctggggaacaagggctccgcagggttgagtccatgggtcgttccaatgggcgatgtggtgaaatctccgaggagtgcatcatcgggggccatgaatgaagagtatcccgcgtgtgagcaagaaatatcattgctagcgtcggtcagtggtggggagaccggggcggtctggtaaagacctgacgcgtattccatggtggttcctgggtaatgggtatcatgcatcattggggtccactctgggcctgtgatatagtggccgtcctcggtactgtgagagctgtgcccgatggaaagagcatcatctggggtgccgtttccgacacagacatcattttcaacagaagagaaatccaggaaggagttataaagatcccgggtcatttcatggtccatgtcagggactgctgggaagtccatgcctgggtacataatatcatttggtccgaccgtgggggtcatcagctgctgtgatagagagaaagaaagcatgtgaacctcggatgagtctgattttgacatggcctggtcaagggagtcttggcggtttagtgtccagtctttcatgtcctgtggatttccatgggctgtacggatacttgagcacaacgaggagctgtcatggctcgaaatttcatcatcctggattgatctcgaggccatatttgagattcctgaaaccatggaggtatgcatggactgtgagatagagacacgatcagagtcgctggtgttccttggagacattgtgtgtgtggatgtgtgagggaaaaacactgtaaaccaggagttagtatctactactcctcatcgaatgaaataaaaagcaaaaaaacagaacaaaaatgaacaaaaaacaacagctccatggtccagaagcgacgggatacctagtgagagtcagtaaagagactaggccgcgtcacgatttagttatacgcaccgaagtcgtttgtatgggattgagatttccttggccgaccagggattatcgtaaggtcctggtcaatgtgtcgtgtctatgttcgggtccaggtctgttgtcaatccaagggagggctatgtggtgccagggcgagaaacattttcatggccggtgttactatttggttgaagcatcatcatccaggtgagtccaggtaagcaaaagaaaagtcgttcatttttggccaggtcagataggtacacaacggccaggttccatagagcaacggcctaagcagaattctaaagcggatgcttcgaaagaccataagtgtcagggagcaagcacattagcttgaaagattccttggttgattccttggggtcaaagtggttccattattgttgagagacggtggccatagtagtatcggatatccaggcaaagagtcatcaagtcattaagtggttcattccagtgttgtttccagaggcagtggggtccagggtatatcaaaatccgcactcaaactccggtcttagagcagaggcaatgtgaaaagcagaaacatccattggcagtagtccggtggtagtggaaatcaggcgatttgagagtgcaacattaaacacatctcaaagagattcactcagcaggtgctgaaggcaggtaggcaagtatcctgggcagtggttcctcaatggtcgccaaaattggcaaaaaaaaacaagtccgggtgtggtaggtctaaggtccttgggtcctgggcaataggttgtcgacatcctttggcaagcacggctgacaggtacaggtccagacaaagcagataaaaaaaaaaacaacgcataggagaaccaattgaaaagaaaaagtgacgggagctacctattgtgtttgtcgagaagtggcagactaaagagaagcctgggagataacaagaaaacaaatcctgtccgggaagtatgtggcagagagaaaatccttgtggcagtgattggatcaaaaaccagggagtcttaggttaagaaagaagttgtccttggtccagggactgagttgttgaagaggagtatatataagaatgatacacaaggtaatcaaggtagtcgaggtggtgatggtggtggttgtagaaaggggtactcagagttaaggaaggaagaagaagaagaaacagaatggaggaggggatcagcgggtttttagcacacaaaaaaatgaaagctcggacttgagagggtctgtgggccataaaacatggcgtgtgccagtctcgcatcatgcaggagacgagtgcgctgttggcaccgtcaaggccagtgctgtcgactggcggtgatggcatgtgcagatagggggggtggctcggttgactgagtggagggatatctactagcggtgagacgggctcggcgtcttagtgcttggcgagaagtatgattggtgacggccgaaggatgacggtgtaagacgaagtccgagttgagggatcggcaggttcgctcgcgtgttcgatgagatgtccaactcctgtttcacttcagggggatcgtatggaggagaggatcccacgtcagagggccacgggaagtatacctgcagcatgcttgtacagcggttgcgactcgaaatagtacaacatacgcacggagtacacggggtatacggagcagtgaagcaagaaataaatggtaaatgtaaattattccaatcaataaaactaagattactggacgacggcacggggcgagccagtctaccagacccacgttgggcagcaatgcagtcacttttctcctattttcgggtctttgttcagtcagccaagttcgaaagaagtatgagaaaaagatagacaaggttgacaggatcagaaaagtaaaaatggaatatgttttcgttcagcaatccgaagatctcaggtgaactatgctttaatattggttgttcatcacgaaaggcaaatgcccttgggaggcagtaaaagagtgcaaaatcaaaaaataatgataggcttacctgttagcgggatttgtcggaagaaggatgagttggcatgaaacaccaagtcatcacaggtcgtcgagggccgtgagggcagtctggactgtgattgacggagaaaagggaaaagaaaagaagaaaagttttttgtaggtggtcagatcacgtgatacgtgtacatttgtattgtttacactgtttgtctcgatttggagcaaacatccaccccatctgacaacggaggccttatccactctccacattgcattcctcggcatcatgaattggacaggcggccagctgcagcgtcatcacactcgctcaggcctgttgaccaaagctcagaagcagaatttcgctaggtcgagactccaaaagggcacggtcatttccccgccttcgccatttcgaaacttccctgatgaattcaagggctcgagcactagggaggatgagggggcagagacaaatgaaaatcagtcagtcaagaactgttggttgctttggctttgcttccgtcaatccgtgtgggcgtactcgtgctaacctgtgatcgtgctgattctagagttccggaagagtcggactcacatttgactggtcagacctcccatggtgatagtggccatggtgatagtggcttgaccggggtcaagcgccaactgctaaaagaacctgatgtggcagccgtgtctgctgcacgtccactcgaccttgcatttacatctgtcggggatgtcgagcgctttgggaagcgacgaaagctaaacgacaagaacagaaatcgacgggtagcagctaacaacaacgggtctgccttttttgaacggccgagatcccaacgaagaggcagaaatccatcctcggtgattgataccattgaagaagacatccagtttgagatagatggacggccagtggcgcaatccaacggcagctcgggggtggtcatgaacagcatgtcatcccagtcaatgctccttgaccatgaagaatctcctgttacggaacaggacatgggcaaagagaatctgacagctacttggattaccaatctctatccccgttcgcaattccctcagcgcggggctatgccgagcaggctataacgtcgatgctcgttttcatgcaagtcagatgaatgacacatgttctcggatatatcagataggtgttggggaagcacatgcttctcactccttgtgaaccctgtcttcccgggggcggcctgctagtcaaatcgtaggccaacagtatcatggaagtgccgttggattttccgaggtcagcaatatcgcctgacctagaaggaaaacgattacatagtcccataccaaccaaccaaccaaccaacaaatgaatgaatagaccaataagatccttgacccaaccaaatccactgcctaggccattctacatgcacgccgtaaatgcccatgctcctgtacatcgtaagttgcaccggttttccgttcctataggtctaaattgccgtattcggtcgtcacatgattggtagctgcctcccgaagcaacgtcatttccgtctccacaaccatctccaattatcaacggcgcgaagataccaagattaccagttctatcgttcaataatgcgttctatcacactgttggccgcactggccaccaacgcactctcaatcgcgctcccgtggcaatccgccccagatacaaccagcggaacccaactcccgctcgtgatctggcacggtctaggcgatgacttcgaacgcgaagggctggccgaagttgccaatctagccgaagccaccaaccccggcacctacgtgcacctcatccgcctagccaacgacggcagcggcgaccgctccgcaacctttttcggcaacgtaacagagcaaatcgcgctagtctgcgagcagctcgccacagacccaatcctcagcacagcgcccgccgtcaacgcactaggcttctcacagggcggccaattcctccgcgggtacatcgagcggtgcaacacgccgcccgtgcacaacctcgtcacattcggcagccagcacaacggcatctcggcgttcgagtcgtgcgcctacgacaattggttctgcaagggcgcggagcagctcctgcggtcgggacggtggacgagctttgcgcagtcgcgcgtcgtgccggcgcagtacttccgcgatccggaagacctggattcgtacctcgagcacagcaattttctggcggatatcaacaacgagcgggcggtcaagaacgagacgtataagaagaatctggcggcgctgaatcggtttgccatgtttatgtttgaggatgatacggttgctgttccgaaggagagtgctttgttctcggaggttaatgctactactggtgaggtgacggctctgcgcgagaggccgatctataaggaggattgggtcgggctgaagcagctggatgagcaggggaagctggacttcaatactgcccctggagagcatatggatctgtctgaaaagacgctgcgcaaggctttcactcagtactttggtccgctggagaagtcgcgtccttcgccgggtctagttgtgcagcccgtgttctgatcattctcttttgggcgtttgcttttattgtacgatatcccaactgcgtgtgcttcatattttggatactagcctcaaattcgaagtccaatccaacgccgtatggctggttggttacatttatagaactaccatttcttgccatgttcgttctagcaccgtctattttatgtctattgacaatgtagctagttacacaacgctgcgactactcatcgcaagctaacaaaggaaaagaagatgtgcgtgccgacagacaagaaacaagagtccaagcgttcaaaaaaaaatatgcaaatgaaaaagaaaaagacaatgatgggcaccgagccgaagtaaaataaccgacaaaacaaaaaggacatgcgtatcgcaaaccgctgtaaaaccgcgaccggcaaatcaaaacatgaaaaacaagggagggcgaggcaggcgggtgagaaaaaaagaccctaacagaaagaaaattatatagacatatgaagggccatggaatggaaacagctgtggagatgcccgcagaatgatgaggtatgaatcaaacaaagaaaatcaataaggtggccgaccaaggcctccactgcgtcgtgtgctgctagatctgctcggcagagccttggaggcagatatggcagttgccgggcgggatccattcgtcagcttattctcgtttggcgagaggaacccatccaagagcttccgtagttgatcttggtggttgccatttaggtcattggtctcatagtcggttaagagttcgggaatcccagatgtggcaaggctgtggttggaccggctcttgttgcggtttagaggcttgtagtttaaggcattggcatcagccctgtctctcgctggaggtcccgatggggctggtgcggtgaatggacgatcatatgaggccagcgagcgctgtgagtcattcgggaagccacctgggatcgacaagccagttgggaccggtggcacgggagggatgtcttcggctttatcgcctgataggaaaaatgccgcaggcgtggcgcggggtgtctccagtccatcgtcatcgggtgttcgttggctctctggtcggattgaggtagcatctccatctatctcggaaacagagaagttgccgctcatcatgctttcgctcccggaagaaacggaactgtcattcgatgcgtcaagtcgtccacgtagcggactgaggcgtcgatcatgggagtcgctagtaaccgaaagcacgcgtcgaagctcattgacgcgaacaggcgagctcctgcttgaactgttggatgacgagcctgagatctctggaatgctcatgcggcggttatattgggagccggcgggtgagccattcgtagccatgttggtttggttgtagcggggatttgtagtagctcgagagccagataccgatggtgttccagtgctttccttatcgacagctgccaaacatgcctcgcgagaccacggagacaacatctgttccttcacgacggacgggaggtggctctcaacctgggatttgactgttgctgtggagccaagtaccgggaacgtgaatcctcgtgctggggaagaagccgaggaggggctttctggaggagaagataccaatttgcaataagactcctcaatcatatagacaagtccttcgacgttgcagaatggtgtcaataggggtggggaggtggagtcattgtcagacctcttctcgctgtcaaaaacaatggcatgaagatcgactgggggtaggcggattttagaaagccagtatcccttggcctgtcgctgctgaatctcattacttatctcctggcccacgggggaggactggatgtcgaaatgctgagacagcgcaagaaggtatccgtgtaccaagctgccaatgttaacgcgagctgcgaaggaactcaaatccatagatgtaaacaagtcgtcttgcaatttaaagaccatagggacaccgaattgagcggcattcaccccgaggttctcgacaagatttgcaagaagtaggtgcagcaggaggatctcggcttcctcggtcgctgcctcgattgcagcatcgtagatagccaggtgcagaaggcggaggaagttcgactgtgccaccagcgccactttgtccctctgggtcgcagggaccgacgaacctcgtcgagtcggcctatccatctgctcggtgtctttcttgggagtcttgatgtacttgggtgaatctaatcgcaccttgaggtcgttcccattggtctcaatctgcagccatgataagaatgcatcggaataggcatagcgaacatcacgatccacatcacgaagaagtacttgggttccttcccacacatggatcccgactgaatgtctagattctacaccagacatggttgctagcgtttttgaattggccacaaccaagatggccttgacggctcggagagcagtcagtttagcggcagcatgcgagaaggtttctgtgcttgctttgtctccatttgtctctggttcgtcacttgtcgcctcatgtgtcactccggattcctgaacggttgccaatgtggatggcgaggaactatcatggtggagatgaggcttaaagcgcctgagaatggcccgcatcatgtcttcgacttggtctccgtagtatatgtgtgttgcaagatctccaatagactgttccagtagcgtaagaagatcctgtcgttggggagagatttgaaccacgatttcagcttgtcgatttttcttctctccgtctgcagagccagtacgctctgacggtgacagtatctcagaagcgtagtgcatgagtccatagaggacatccatgacactgagtccaatcatgttcacagacgatttgagaagcgaatccaccacagagagaatggtgaatgatgactgtaatgcatcctcctttggggttgtatcatggagaatctccatagctgtgatcaagatgataaaacgaacttgcaccgggcaccagttcgcaatgaggtcgatcagagatgttgcccagttgccacatttgccctcggtaatctcgccgcgcttttcgctctgcgggaagccctttctcgaaatgaactgtagaatgaccgttactacaatacggatctggccccggttactccccgaggcgatagtctgctcaagacagcgcagggccaagacccgtgcatccatttccgcctttcgatccgcctcagcggccgactgcgctgccagctcggggtcaccttctgccacgtccactgtgtgcaccgtgttgacactcattcggcggggtttgggcggctcgcgttcatttgcctcggtttcggatagcttttctttcagtgttatgagaagattctcatcttcagaatagaggttcttcagtataaccggcaaacagagcttcagcaatgttcctccatcggcggtcaaggtctctgagctgaccaccgctctaatagcgcgcaatcccgcatttctccaccggatagccacctgcgggctgaaatctgtgttcgcatttgatgtaaatcccgggtcggcaaggccggtgtaagttcgcacaacttctcggtattgatgtgcaaggctctggtcagccgcgatggccgcaatgtcctgatatcggcagaacatttcgaaggtcacaatcgattcctccaccatatttatatcgttggatcgcagaatggtatcgattactgtcatgacggatcgggcgtagataggaaggtcgcgaggaactttttcgatgattgcagctaggatatgcagcgccacctgaacatttctgtaacgaaatcggtcagtcattcgtcttgtccgagtccgattactcgggcgatcagagtctgcgctcaccctattctgcgtctccagacatctcgggcaaccctcttctccagaaaaccgcagaccttggtcaacttgctgcggcgcgtgctcgtatagtatagcaggtatgagagttcgctggagttcggccgaacctccgacactcccttctggtatttaggataacatttcaaggtcaagacctggtgctttggccggcaagactggcgaacagattccattggaaacgcagtgtcacatgcagttccaggcgggggttccacgaaagaggggaacttggtagtattcgaggtgaaagatgaattagagacaagcgagagtgcctgagagagtattagttaaggtccatgggagagacgttggaatgttcgaaccggcgcaacgtacggagtatgtagatgacaacggggttgatgaggtacttgtgcacggaatagttcagggccgattaccagggggcggggctctgtcgtaacgagtctgaaaaggcacagaaatcttcaaaatgtactgatttgaaaggaatggaagttggaaaggggagatgatagaagaaaaaattaaaacaagattgggctccgggatcatcgggcgtattctatattctacctgttcgtccactcctgtctagtcttacgtatacatagaaggtcctagggtttatctttttcatattgttttcgtgtttcggaagaattgcgcatcaagataatattgttaattccaattgctatccccttcattattaggagagtgtggcgataaccccaaaatgacatagcgtcttcagctcggagatatattgtcggtcatctccaacgccgcttagtcttttcccccgcaattctctgccactgtcgtcagagcaaatggggcacttgaaaaatcggagttcactgggagttcgattgataactccgaaacctcgggggcctgagaatcctcggtcgcacagcacgttcaccaaactcccatgctcaactccgccaaaggggggctcggtggaaatgaaatcaccagagtttgaatttcttgttcgacttaaaaatgtcagggcgcggtgtgttcgtatgacatctcggtcgcagcgatcgtaggatcggaattcaaacgcatcatgtcttcccattttggacatcttcctgcttttcatctgccgtgtcggtttcggcctgggctggttcagggacactgacccctgccagaccttcaatgacctggggtagaataatgtcacggcggaagttctcctcctggagcagtcgaagcgctcgcagtgtgggaccagggtgggtgaggaactgagagtactccggtgtcttccagtaggagtagaggtaggctaggtaggctgcaaatgcctgcgcgtctggcgagggggagtcatcgtcatcgtcggcacgagcgatacccaggagattgggataagtgactgccaagtgtgacaaatagtaagggttggcgagggacgagacaaattcaagttcgagagtaaaacgcgggttggtcaggtttggtcgatcctccatggtgaatctgatagagaacctcggaggattgaaatggcagaagctggagagcttcaaagtgagggtgttacggaaaacgatagcgtccattgaagtaaaaagtatacaaacatcgaagtactactcggtacatttccaactttagctctcatagaattcctatatcaactgcactatttcctcgtctgctcttggtccatatcctcaaaccatatactcttcttcttcccccctcctcaatccccttcgagctcattccaacttctccaaaagcccagccttctccaacgctggcctagcacactcctgagtccagcgagagaccctcaaacgcctcatcctagcttgggcagagcctgacaaagccaaggaagttgcaggtgtcacatactgctggttctcctcgattacccgcagcgcctcatcccaactaccggggtagttcttggtaagggtagtgcctattagcatcaggctttctcctatttccgtgacttcatgcgccctgacgctcacacggtcgtggtataagtgggcgccggcatctttagaggcaatgaagtgaatgtggccgacctcttcgttggtcttgacaaagatggccgagtcgccttctgggggagaggaggcgaagttgtatttgacaatgtagactttgtgtctttggggctccgccaaagtgacgttgaccatggtgtcggtgatactcttcgtggtattgttcatagtagaaaaagttgcttcgagggtttgtctttgcagaaagatatagagagctcgaggagtagacttggggatgatatggaggtagatttacacggcgaacgctgactcttaaatactctttgtctgttttattcttatttctatttctgtttctcttttccaaagaaatcacaaaggcgcctctccattgtttgaagtcagtttcagttccccaagcctatactatggctttaatattactatatctatagaagccaacctgtaagcctataaataccaatagattcaataacaaggactatatagatcacggaacaacagaacaacagaacaacagaacgccaggaccaatggaaccaacagaaccaacagaccagtttcaccagtccacccaaccaaaccaggccattatatcaatggcgtgaagaggcacatcaagatatatttattctcaacaaagtcaaagcctcatggcaaagcaaatcctccgccttctcacgagacatagccaccatttgtttcccgctcagtcgctcagcaggcaagttgcacagcagagagtcccagctcttaggatatcttcgaagacgtgtggtgcccgtgaacaccaactcagtacccttgaatttcgggtgttgggtcgagtatgtcactcgttcacgattgtagcaatacccccagacggcatcgtcggcgaggtagtagtggtcgccagtagaagatccctcctcactaacgaagagggctgagcgggtcgggtgcccggaaggagtgcatagggtgtatacaatgtatacgttgaggtacctcgatgaagattgacccatggtggtatatgtgtgcgattttggaaggatagagagttcaatgatggagagatttggagatgatagagacaggtttatatggcaaatgatacttcttaaatatcttcggaatcatcattactctaaactgatatatatcttggatatacaaactcgaagttacattatcatcggtttctatcgttagcgatccaagtggtcatgaggccttgcgttgaaacgaggccccgtttgagatgatatctatagagaacaatgtattgtcttctaataggcaaaagctatatctcacgaaaaatatgcacggcgcttagcttgaaggtcagtgcgtccaaggaaactccagaactgaatattcgttgccatccaacatacggaatacggagtataaaattccagtaaactctagccagctaaaacatttgctgtgtcactgtacttgtaaaatctaacgaaggcgtggcagagtcattaatgacatgttcagtctaatacttctacagatagagatcagggatgaaaccatgttggaaccaacgagttcaattatcatatccttttcaaactgacatggaaaacagcaatcggtaaaaaaatacatgtctctgaaagcaagactgaagctgagatacaagaaagaaaaaaaccttggaaaaaactccgatcatagccatggtcttatcttaagatcagggcattgtgtttcatggcggtctagaatcagaagcacttggaagcactctcttccgaaagatacgaacgccatgttaggcgccgtgcgttcatcggtgcttgatgctgggtattaacgtgtggaaccatccctccccattgaggagttggatggtgagatagtgagggaatcatggatttgacacatcccggaggtgcacccgagtgagaaaggcccgcttgctacatcgtatatttccgggacaggctcaatgtgtgactgctaggtgacctagtcgctagtccgtctttccggcttgggtttgcgcagactcttcatccggttcaagaacccaccaccaccaccagcagtgtttagcctcgactcttcgtaaggtcgctcgctgatgatcttgtgctccatttgcttaggactgctggacgatcgaactcggccgccctcgaggcgagcttcgatactcgatccctttttgtcccactcttcctcatattcgtcttcttggaagtaggggtttctttcataaccccgggaggttccagaatggctggagctcacctgtggcgcaggggggtagttgtcgtttggataagcaatgcgaccaggagcacctcgtccacgtagtcgctgagccaaactcttcttccgtgcaaggccaccattcggtcccataccgttttcattctcagtctgatggcgtgaaatggcagaccgactagccggagctccatcgaggaaggtgctggttcccagtcccatactctgcggcccatgaatcgggtctactcgggcagtgggatccatgacagccgtctcagcgttgcggctcgcagcggtcgagaagtcggtgtgtccctcctccatcctgccatggaaaaggtcaagatcgatgttagagttgttgggccctgcgccgcccagagccatgttgctggaacccttggggaaagcttgcattggcgcggtacgcacgccgcggcgattgcgatgagggttgcaggcatcaaacggaccatcgtggtggaacactattattgcagttagcatgagccgtatactgaaaaaaccgtgatacttacttccggtaccgtaaatactcgtcacatccaacttatcaatgatatcaagtcgtcgatccttgcggcccgagcgcgatttgccatctttgctgcgactctcacgctcgcgacgccgttcacgtcggcgcttgtcgtcgtcgtcatcaaggtccaacagcgaacctcgatccattaccgaagactccgagttccgccgagcacgacggggcgccttgtccttggaggtttgggacaaagcaggggggtcggcgaatatgtcgagcagatctttctgttttgacaccgccggtcgtcctgctggacgctccgggcgctcccttgagggtttggtgcgattcgagggagtgcgttgggtggcgtcagacgccgcaggccgaggaagatttatctggggggcaggcttgagggagagggattcctattaagaggttagaccagatttgagtatgtaggttcaagattccgaaacatacaaagagctcccgagtgttggacgacatatcattcttctcaattggagagaacatattggcactagtcgacacgccaggggtcggctgcagaggtataccctcagcgtcgtctaagaatgggtttgtagagcgtgggcgttccggacggttgatcgatgaaatggatccaggcgaaagagcgcggttccggaaggggttattggagccaaaactggccgctgttggagaatcttggtattctgttggtcgcagagacgttttgaatcagtcacaggtctgaaaaagatagaagaccagaaagtcaagggaaggtgtcatttatggatcaggggaggggggttcaaactacccccagcggtaacgtctgatatcctatgatttaggggaggtcaagcttctggttacgtaccctgcggggccagcgacacgccaggcgcatatccaaacgctggagtggcattcattgtgaaggatatttcgcctctgaaacaaggtgtgggtggagaggccgtttgcgtgcaatgagatgccgcgttaggtgtcgcacgaatgcggaagaaagtggcaggaggtagtgctgaaacagtgataatcaggggtaagatagtatggactaccacaggtcaagttcaacattcaataagcgagaaggtataacagaatcaaagtgaaagaaagaaaaagaagtctaagggagaaaggagggggggcaaggggattagggaacacgggagaggcgagcatacgtaaattgcccagtgatcgtctccttggggaaatcatcctctttcacttggccctgtcgatctttctatttctttctttacattatatgtgttcatgtttttatgctatgccgttcgggcttgtgttaactttttctcgctctgccgaatccccagactggcgttatagccgtagaggctaataccaaatcatcgccaaggttccactttgacatgttgtgacagttcaggaactgactgctatgtactctgtacattgacttcgactggacatctggggacatcccagctaatcaggcacgtactttgtacattgtacataaagggatggagattcctcggctaccaaaaatagcccaccccggggaatgacgttgccattccaccttgatatcatcttctgttcctggaatgtgtatgcaacatgatatcttctgttactttccgcatctccagatctcgtgcagtctagaaagatccaaagtgatgagctcatctgccgagggagaaggacgcaacttcacttgcagtccccgtggataccactaaaaaggttgggatatcagttatggccaatgagcggtggctgaatatgaccgattcgaatgctagttcgctgtatctgcatataaaaccttgcatttcgaatataatgccagcctctccagacagtttagccgacatctatctagtatgcggagaagtattcgggactcggtactccatagatatcgaacattcttcggcttggaatgcgatctaagatgaggtcataacttgaattaagatatcattggacttgcatacgcagacgaattaggtagaaactacctgttttgttcgggttgaatagtgaatcggtcaaccctagccgccttaatgcgatatctcaaggtggatgtggctacgtcagatctgaacctacctgtgttatcggaataccatgttggatttactgctatgtgtcatagcagccctaggattttcgtatgcgctacggtccattcatcccaataaagtagagtagttttgggcgtacgcagcctgctaccacctcaacatacaaattcgaaatatcattcattgattttgtattcattaccgtgtcatggcccaattcgaggacgggtcccctttcataaacgccacacataagatgcaaacaagatggtataaaacacaaaagaaaccattcaacggggaagccccaacccgccttctagaaggccgttcactgggcgatggattgagcccgcggcaggtgagggttggagacagggatgcccgcacggcgcttggactggggctttggtctggagagtgtatatctgaaagtagaaattagtacaagattccactagattcaaggatggagagaaacatacttggcaaatgcacgagagagtgccttcttgcagctgaccttttgactgccgatgaacgaatccacagtaacagcgatggcacggtcaatatctagcgaggagcagtactctgacagacgcatcttgcagaaagattctgcgatacgcatgatcgcttcaagatgacgaacctagaagattggagtaagaaaattgtcactgtatagacggtagggagatgacttactgtaatggggtacgctccggtggcaagggactcgcggcgcatgtctgcgaagagacgggcaaccttgtcctgatcgatctgataaagcttggggtggcaacgctctcgggcatacataatatacttccgcaggagctcctgcgggatctcgccctctttctcctcttcgtctctttgcttctctgctgcgcgtttggcgatctcctcctgtgatggaggcagtctctgaccatctcggttgatgcggtaaccctcgttgtcaataagattgccgtcggtatcaactaactcgcccttttcgttccggaggggacgagcggggttggaccggtggtgtgattcaatcacgaagttggccaagcgctcatcctcggcagggtcaaccaaatcacgcaccacacagagaatatcgaaacgagacaagatagggtccgtcaagtcgacattctcggagaatgggatagagctgttgtaccgaccacccttggggttagccgcggacacgacagcacagcgagcctgcaatgttgtcacaataccggccttggagatagaaatggtttgctgttccatggcttcgtgaatagatgtccgatcctggtcgttcattttgtcaaactcatcgataagacaagtaccccgatcagccaacacaagcgcaccaccttccaacgtccattcgctcgtgagaggatcgcggcgaacactggccgtgagaccaacagcactagcaccctgaccagtggcaaacacagcacggtgggcggtcttctcaacaaacttgagcacttgagacttggcggtaccaggatcacccagaagaagaacgttgatatcaccacgaatgtgcatcttgccctgggcctctttactaacaccaccaaagagtgaaagtgcaacagcagtcttgacatcctggtggccgtaaatactgggtgccatagagcgaataatcttgtccacaatatcggggtcacgggagagggctcggattgcgcgctcatcctcttctgtcagattgaaaccagccagctgatcgtgtgccttgaccacatggttggcctcaattacggtggcgaaaaccgggaagccgtttttgttgttcagttgggcatcgtagctgttacggtagacgccggtaatctcaatctcatcaccgggtttagcgctatcgattagatcggcaagcaaaacgacctcacgctgccgcggcagacgacctgcgggaaccgagccgggcgactcctgcaaggtcaacttctggtagttgcggtagactgtcttttcagaattgacagtgaagggaccacgcgactggcagttctgacagaacgagatcttcacctccgcactagcttcctgctggaacggacccaaggtgataccgcacttcttgcagaggaacatgacgtacttcaattgcgggaagacaccagttctacgggtaacaacaccactgacacggatcagacagttgagatgcgactggcgcagctggcgtagggtgtaaatgatcggcacatcagtgatgcggacgtggatttcgttgtgaatatcgtgatattgtgggtagtggaatagcgtaacgtcgagcgcaacctgatcaaataccttcaagacttcggtgggttcgttggcgaggaagtatgacaaagctgccttggtctcgctgaggtgggcgtacgacacttcgagtgaagcggagttcacctcacccagtgtcttgattcgattaccgtaaacagactggccagcggcgtcgatgaactctgtcaggaaggccttgaattcacgatagatggagcgaagaacctggggctgtgtcacccagtctgtaatgttggctgccttcacatctgccagttcctccaatgacagctcttccatgccctcatcagccatgtcaatatcttcacgatcctcatcataatggtgtctgcgtcgccggggttggcgcgacagatccagttccatatcgtcctcatcttgtaaaaaggcggcaggcatgcggcgccgacgtgctagttctcggtctctctggtttaggcgggcatctagctgccgacgagttgcggcatcgatttcatcatggtcttcatcatcgtcgatgtatccgtcgttttcatagcgatcttgcgctgcatctcgataatcccgctcgaagttgtcaccgaacagatcaatgccgtcctcgtcttcagccaattcgtcaatgtcatcaatatctggcactagacctctatcctcatcctcatcttcatctcccatgtcaaaggggatcggaggaggggatgagcccaaagcagtggctgcacatgaacatcgtcagtctcaatttgacgcagcccggacaaagaagcaaacatacgactggaaggaggcaatggcgccggggaggacatgtcatcctctctgtctctcttacgagtgttggccccccggccacggtttgcggccgaatcgctggctcggagcggactgtagtgcattagcttttgagcgcagaaaattcaggaggcacactcactccattgtgtgggtatttcagctggcaaaattcaaagaaaaaagatgaacggcaggaaattatgagtatggataagtatatgtatgtttcagaggttttttactcgagtgtgtgatagcgtggttgatagaatgaagggagggagaaggggcggcaaagtcgagttgtgcagagagtcgcgtccaacacgcgacgcgtttcaattaagccccgattaggaaggtgggccttccacgttccctatctttacacaacgggctcctggtttattttctatggcacaatttacagcgctgtaactaataagaacaaaaaaaagaaagaaagaaaccacattagactaaagcaaaaattggaacttgcaaaaagtcaatgaccgacgcagggatcgaacctgcgaccttctgtgaactccaacatatgaaatgtaagacagacgccttaaccacttggccagtcggtcgttggagtgaacattctgtcgcaagtgtgattgatttcatgactagttcctttcaatttcaggccgcctgcccattgagcattcaaccactttccaagtttatagcatgctcaccgctcaacaccggtttgccctttatccactttatacatcgatgtatacaaagatccatcccttccacatcaagttcttgatcaaaacatggatccattaccccaggacaaaacaccgtcgcgacaaatccgtgcggatatcaccgaaatggctgcgaaggctctagtcgataaaaatatccctcttgtagagtggggatcacagatacagtacagatgtggataccctttgatccttagagtaagagatgaaatatcctatccagcaatttagtcgtggggctctactgacttcctaatcctagcttgttgaatgggcggtgcccgatgcgctgctatcgctcgcatcccagaccctatcagaccggggcattccttgtattcccccatccgcagaggctactgcgatatatggacaatgggaacgagcaggctttgttcacagtctagatccagttcgttcgcaccgaatatttctgtacccattgtcgcttctcgacctcactctccaagacaccgtagaagttacatctacctttgaccatacgctgagggtcttgacacctaagcctcgaatgtacatgatatcactaatacgccatcttctcaaccaccctattggtgacagcagcagatatcatgtggaaagtgatcttgttggttttatatcctcttacatatttcatgacccacctctgaatactaagaacgatgaagtcgacgatgagagcgaagaagacttccagaaacgggtggaagaagcagttcggaatatcaaaaccagggattggggctcaacggaggagaaatatttgaccattgctgaacgtgtcgtccgcgactgtcggtctatttcacagctctctagttgcgaataagtgcaaagtcctgcgcctccatcgtgatctcaagcagggcacgaacagtagtatgtagttcatacaacttccgaacccatgaaagcaaatcgtcccttgatttctccgggtagttcgtgaaataaatgcgaagattctttcgagcaagccagttcaagatcgccgtaatatcctcaaagtcaccgcgagcctttctgttactttggggacgggtggattcagcaataaacgcccatctcttgatctttgtaagcacgagaacggaggggtgcacaatagggactataatctgatggttagtaagagttcgaaatctagtataaagtgcaaaggcaaaaggacactaactcgggacatcgccaacgcgtcctggtaagtcgctggcggagacatggtaaagaggaacggaacttgcatcgggtagcctcgaaggtcgatttctgccgccacgaagaatctcaacccgaatcgtaccctgatcgcgcgtaaaaaccaggttattgctctgggagagttggaacccgggcacctggagcagcaggtttcggacatcggctgggtctgcgtcaacgaggatatcaacgtcctaggtagttcaaattagcttgagtgatcgtgcaagtgttgagaagacactgaaagggcgtacatctgtcatcctcattccaccaacaagggacaccgcgtatccaccgataaagccatggcgacagttgccacgggtgagagcagccgtaatctccttggctgttgtatcgagatggtcgaaagtgctatgtatgaactgctcatgtgtttgttccatgatgaagtggtatgtctttctaagtgattggtgctagcgagagatgaacgaagaacaacttgaaataaggttatagagggaaggacctaccacgggaacggcctcaagtacatacctacatgtactagtagtgttcgaattggtgtttgtctttttcttttaatagtcctttttctgttttcatgtctttcttgatctcatttctgaatgtcttccctctttctagtgttatataaagctcatagttttgctcggagatgtggcccggatattatgacccgtgctcccccaagagccaatactcccacgagcaaggctgatcctgcccatatttgcccagccaaatagccacctcccgtgcgcgcgatcaacgctcccgccacggatggcccggtcaagggtccgaagcttatcatagagagcgacatgccgacccgagtgccgatcttgtccaggtctttggtcaatgaaggaatagtgccagcgaacaagcccatagcggccgccgatgccagtccataaaacacagcaaagatatataactcggccacagtatgaacggcggcccagcagaacatcagaatgccgcacagcgctacccaaggaatcagtaggttgagcggcccgatataacgatcggccagatagccacaaggggcgcgaatgggtatcccaagggcgttggtgacgataattaaattcactccggcttcttgggacaatctgagcttttcagtcgcatagacttgcacctggaaaaccgtcagcccaattaattatagatcttggatttggcagcgtacgtagaagaaggcaaaataaagggtccagtatagaaggaatacccccaaggtaaaaagcatgtaggccggttccttgaaagcgctccattcaatcagtggtcccgctttgcgtggtggtagtcgaggacgcaaaagtgctaaggtgattatgaccatgatgagcacgacaaatcccatacacctgacagcccatggaaaccctgattatgtatttatctgattagctatgaaaaccagtgcggctgaaatagacttaccgatcttcggggtaagatactggatcattgcagggaaaatcatgccccccgtacttgttcccgtggcagcagctgtgacggcaaagacccgatagcggacaaagtatgtcgagatcaatgtcacagtaggcagccacatgagaccctggccgatgccaatacaaagtccctgagccagaaagatctgccagtaatccgtggccagactcgtcataaaggtcccgataactaacagcagcccacctagggctaccaccggccttgccaatccagcatctgttgcgcggccggagagcgttgagataaacaaaagacagaagacttggaatccaccgatccacgaaatatcggagggggcttgtggtagcgtagactcataataattttggaacaccccgaagctggaggcgtagccccaagtcagggctacgaccaagtgtcctgcaacgacctgagcccaggcatgaaatccgccatctggaggtgggggcaatggtgcatttgacgtatctctcactggcgcatttggtgtttgggtattgttccctttctcttccccgctcgcaattgctccggaagactcgtaggctgtcatatttcgctcttgggagaaaaaaagcaccctcaagaagagcagattaaaaatgatatagatgcatggggggaaaaaagggtggggatctcagagcacaaaaactggatggattagaaatccatggatgatccctgtctttgtatgtcaccatcagatagcgggtttagaaaatacacttttgtctttggatagggcaaataaatagggcaaataaagaaactatagtcttagtttcctacaggaatgctccttgaattggggtagagctatgtgtcaaggtgagtaatagcattataaaccaagtatggagtaaaagattgggagcgggaacatgcaaagggctaaccttggaatatcctgaaaattccaatacacatggagttacggagtcctctgtaatgtgtataggattgaagtcaagatctgcatactagtatactagatttccctccaaacggtctggtagccggtctagtatatgtctcaggtatagacccaagcattcctgggaccgggccttcctcaagatgtcatgaaggcccatgttcattcaagacattctgtacaaaggttctcgtcttgtaagtgacttatggcttgctccatggctgaccaatcaaggtcaaagtgagatttgcgggatacccagggcgggatatcccgcctgttccaccgcccctccgctccacccatctctgtgcctatccaatctaacaagcaagcacaattattgcaaagctattgagataaatgcaaatgatttttatcctaaaatgtttctaacgtagctttttgcctggtgggcaggcatatgatcttgcgacaaatcagtccttccagttgaggtgcaagctttgtgaaaaatttcagtcaagccgcctcattgagatcaatacataaatgtagatcctctaggcctttcaatgtagagagtagagagtcaaattgttcttcggagagggcaattctggggccgatattaccacagaaattggaatagtaggtatatagctttcggggtctgcagcttgagccatatagtgtgagaaaaagcttcgataattctaaggagtttagtttccttatctagctacactgaccagtatgggtaaacgctcataggctataaatatcgaacaaaaaatcaatccggcttattatctatcgccttcctaggaatagaactgtctactactatagattaagcaaaaattccgttctataatctgcgagtcctaatgtttaggggttctgaaatcgatcttatattcccgaagttgaatactaaacgcttctgattctagtagattggaattgtctgtaggtatagctttatagatagtataccgactttccagcttattgccattaacttgtcggcagcttttcgatagtatatatactatactaagggacttttcagtaccattgaatagagttagtattatctatagctcttagatatacttacagagaccatttgacttggatagttcttctagtttatagagaatttcgcttatcacaatgaaacggatttttcggcaaaggtatccgcgaaattctccagtgagttcttgtacaaagtacggcatgataatctcagagcgaccaattgctggaaatccaactggttatatatctttgagattaattccacgggcagagctgcaatggatattttggctgcgtgtgtgacgtttcaagattgagaacaatgataataagaggctcgatttgttatccgcagaaatgagtgttaatcagccttactctctagggctccgggctctcttctccctttgacgagaaagcgaaagcaaggtaagatttctgcgccgagagacaatgagaagagtagtgcaacttgcttcttctttctctcctaatcttagttattttgaatagaatacactctgcttccttagcaaatcacaggtatctgctgtcttagctactatcatatgcagtttggtacaaaagcggtatacaaattctcagctaaaaccggcacctgcatgtctatctagcgtgcttgttccacttatgtagagaaaacataagcccatgggcggtgtagggcggtaacgcctgcatttgttggaaaatgccggcagaaactttaagttacgtcgcgacccatcacgtcgcgtcgtgatccaacatatcgcctcgacacttaggacttaggcctttcgttatttgtcaatttctacgataaggacgctgatacaattcccaaacatggacgccccgcactcggttgttgctcaactcaccgaagatgctcgtagtgagagcatgggctcccagaattcccagaccgcgaaagagtatgtctccccaatactctcccccacactaggaaagtgatatactaattgattttaggtttattgaatcccagctccaactagaggcagatgcgcgcgaggctcttccttatgtcagtgtcccaagaaagcaggtggcgcggcgtttgacttatctcaacagctgacttattgactttaggcctttgactcttgcacatatgaccttggaccattgcgacaggtactctttgcatgtctcacctgcaatcctcctcctgtcagccccaacgaaccctacactgccgctgccgtctgttactcgtgctcgatcgcttgtcacggcgagcataccctagtcgagctcttcaacaagcgcaacttcgtctgcgactgtggaaccacccgtttaccatcatcttcttgttgcacactccgtgaagatcccacaaccggcaaaaagggtgtgcactcccaagaggctgcagcaggcaacacatataaccataactttcgcaatcagttctgtggctgcggcgaacagtacgatgcggattcagaaaaggggacaatgtaccagtgcctaggacttggcaccgtcgagactggaggctgtggcgaggactggtggcacccggagtgtttgatcggcttgtcgcgtggttggaacaaggctgccctcaaggccaacggactcggtggcggtgatgccaccaatgacacttcagccgagggcgaagaagatctgcccccacctggctttcccgcagaggatgattttgaccatctgatttgcttcaaatgcgtcgactctaacccctggatcaaaccatatgcgggcactcctgggttcttgccgccagttttccgagaaggtggactaaaaaaggcctcgaatggggctgagctaaatatgactgagccaaacccctccgtacccgccactgagctcaaagagactgaacacaaggatcaggagaagatcgaacactcaaacaagcgcaaggcagacgacgagggtccgaccgaaggagagcctatcaccaagcggattaaagaggaagaagctcatgtcgaggaacaaccatcgaatgtcacaaaggaagaggagcctaccaaggaggaaaacgatactcctacaaagccatccgcccccaagcacacagagctcccgaagtccactccagtggaatcattctctctttttgccttggatgatttccatgggcagctgtgtcgctgtgcagagtgcttccctaagcttattccctacccccagcttcgcgaagaagaagatacctatgagcctccgatgtccgacgacggcctggctgatggtaccgcaagtgtcggtactggcagcatctacgaccgcggcgaagcagcactaaacaacatggatcgagtgcgcgccatcgaaggtgcaatggcatacaaccatctgcgtgacaaactcaaggtctttctgcaacccttcgctgagagtggacaggctgtcagcgcggaagatatcaagggatacttcgaggcgctacgtggtgatgagcagggcatcaaagatgccgctcatcacgcttctaccgtgaatggtgacggcaaggatgatactcacggagataagtgacacgagcagcatggcatatgactgactgtcaatttcttgtctgattcaccgaaaccgactcttcgctttggtcgcaaggtactgattatctttttttttctcgcaatctttttatcctttcggcgttatcatcatcgggtgctatatgggggtcttcgggggtggttcaacatgtacgatatttagcgaatatgggattgggaaattgggcaatggtgggaggtatgagtacgaacggcgcatcgtatgcaattgaaatgattactatctagcagagctcgaatgactccttcaattggggatcaacccaccttcatggtacaaatacagtggtctcatagcctccgggctaaatggccatgatgcaaccccccgagttataacgccaataccgaattaaatatatgatgtgggtggatatcatggccagcctgtccacgcaccgcaaaatatgatcaacagatatgcagcaagaatgaaaagactactccttgaggcgcttggaagccctcatcaatgaatcatctgggagtccactccgtttggtgccaggaagactaccggtgcgaatatcattgtcatcttgggtgacccgacggtgtgggtatttgccctcgataccctcgaagcagttaccactgatagggccaccattggtaaagtacgggtgctcaagcgcctgctcggcagtgagtcgcttcgctgggtcatattcaagcatacgcgacagaagatcgaatccatcggcgccaggagtgccagcactggaggtggacgtgtatccgccgttcttcaaacagctctgataccagccttcaagattagagccgcgatggaaatgtgaaggttggcggtggagcactagggtctggagttgggaatattcaggcatggaggctagacccggccaggactctttgcggggaagaccgaggatttcgacaatcttcatcatctggttacgttggaaagggactgttttcttgctgtccattttggcttcttcgcctttgaagattggtcgcagcgagagtagttcggcgaagatgcatcctattgcccacatatcgacggcaggagtatagtgccggctccccatgagcagctcgggtgcacggtaccagattgtgacgacgaccttgtctcccgagaacagggagttgagtggcttatagaacaggcgcgctagccccaagtcgccgatgcgaatggcgccacttgaggtgacgagaatattggctggtttcaaatcacgatgcaggacccaattggtatgaagatagagcaatccattcaacaactggaacatgatagaccggaccatagtcgccggaatggcatgtcgctgaggctgggtgtgatgatgaatgatctggagcaaatcatgctctgtatattcaaataccatgaagatgcatttgtcctccagaatgatctcttctagttggacaacattggcatgtgagagttcagtgcacaatgccatttcacggatagccgactgcgacaaacctgtgtactggatcgtttcgccttccttgtcgggcttgaatctggatgaggttagaatgaaaaaaaaaatcaaatgttggagggtttttacttcttgattgcaaactcccctttcttgccatttttcccgacggccttgtacacccggccataggtgccactgctgataaagcctactatgttataccgatctcggacccggactttgctggtatacccaccgggtcttcttgattcaatggcatctgtataaactcccagttagcatattccggttgccggattgagaatggaatgccaggcgagaatcccttccaatttgcacactcgcatcacaaagacaatatcatcacagagaatcaaagggaaagagttaccacgagaatagaatcctccagaattcaagaaagggaaaccctttccaaacatgatggaaagatagaaagagacaagccgttacaccaagaagccacgagtaatcagattcaaagaagatatataattaccatcgacagtagcctggtgactccgtttcaagttaccgactctggttcgcgagagagagccggaggaagagggcgggtttgtcagactcatttgtggatcagaagggccggcgatgttgtcactccattggcggggagatatcttctccgcgatttccagtttgaatacagagaaggattcgaaggattcgagagatattctaatgtattgcctgtatcgtctgaattgtaccccgtatgttgtacaatgcgatgagttcagcggagtcaacgcttagtcagatcacatgtcggatccatccagcttcaacttcttgtagcttcacatgttcttcaagtcaactagttcaagtccctgaattgtgaaggactctatgtgctaaatttaatgttacatttgcctacctaggcagaccttcccgtctgaccaacttgacctcagatcatcgtatctctacaatcagcaaaaaacgtcatcctaggctccggccctccctaacgtaccttcaacctgtcccggggcatcgattggcctaaatttatctcacaatggttttgggcacattaacacagtcgagggttacaccgtacttgatctatctcgtatttattgtcacgcttggtccgcttcaatttggcttccacctggtacgatagcatccctctatgtctactaaacatcactaatacgttcattacttaggcagagctcaatgcccctaaatctgtgataacatgtgaacgtcaagggattcattcttcgggaatcacgagtcttccacaatgctttcctatgaccccatcgcaatttggcctcgtctcttcgatctacacgctcggtggcttacttggagccctgctagcaggacccatcgcaaccaaatatggacgtctacttgcattacgagtcaccacgatattctttattctggggcctgtggcggagacacttgcaccagcaatttccctcttgagtcttggtagatttctctctggaattggttctggtgctgcaattgtggttggtcctatctacatttcggaaattgctcctcccagttctcgaggcctcttcggtgccttcacccaggtcatgaccaatgtcggtattttgttgacacaatccctgggatacttctggagcaaagcaagcctctggagactcatactggctgtggccggaatcatcggggccctggagctcttggggttgttcttggtaccagaaagtccttcgtggctcgcagaacaccagaagatcagtcaggcacgccgcgtcctgcagcggatccgcggtcgggatgccgacattgaagcggagattgagagttggagcacctcagatgtccctgcatctggcgaggaagagtccttgctctctaattcttccggtgacaggccgtctagaaaggctgcagtcacgttcatgcaggttgtcaaagacccctattaccgcccggctattattgctgtggttggcgtgatggtcgcccagcaactcaccgggatgaacagcattgttatgtacagcgtgtctttactccaaagcatcctaccaacgacggctgcgctactcacagtaattatatctgcggttaatctcgtgatcacgctggcgtgctctcccctgcccgatcgcattggccgaaaattgtgcctgatgctgagcatctgcggtatgggctgcagttccatacttctcgcgataagtatcttcatgagcgctaagattttgacggcgatcgctgccttactttttgtggcaagttttgcggtcggactaggcccggtcccctttatcctggcctccgagctcgtagggcccgaagctgtcggcgcggcacagagctgggcgcttggtgccaactggatcgcaacctttgtggtggcacaattcttcccagtgctcgatgatgcccttggtggccgtggacaggtatactgggtgtttgcagctatggctgggttgttcggtgtcttcatctatcgatatgtgccggaaaccaagggcagagctaatgccgacgaggtttggggacgagccgaccgacgacaagactgactccagatgagtcctattctagaaatttcatagcactatgatttccaggttgttcctcggctaaactacatagtagcactcaatatttgtataggatgcggggttactgcagggccggagtacattgcataagttgtacaagttttttttttagaaacaaagcaatacatacagtatgtccatggcatcgccaagtacacaataggcatccatttttccaattgccaccttatgatcctataataacctgcggtgtggaggtttctttgatgtcgacccccgtcgacccccgttgaccgcaattggcagtgtttctcccacttttccccctcaagtttctctgcaattccgttgagatcggccgatcatattcaaccaatccctgtttttggaaataacggagagaacctggaaattacagtgggtaaatccgtttcttggcctgtgatcgacccgggacacaaccagcggatcggcgatcagctctggggggctcttgaacgtcaatcgtctcgaccagggagcaagccacccgccccaaccctttctattccccctactttcttttcccttcttataatttttctcatttgtgtacatccgcaatggtccggttggctctcccccaacggttgagctcgcacctttcggcgaagagcgcgccgtcgactcccggacggagcagaagcaccagtccgttacgatcaccggaactcaaacctctgctgctgaaggtttcagtaatccgagtaagtgctgaacaattgtggaccattttcatgttggtgggctccctgactgattccaatggtttgattagggacgtaacctcgcagccaaagatcgaggtggcacgagcgacccagtaagcaccctgcgatcaaagacaattcgaatcgtgaccgcttacatgttgcacagtatttggtgattacattaggagatgcgaggcagtcgacgccgaccatattcaagaccctgaacccggaatggaacgtctccttcgacatgcccgtgatgggcgtgccgctgttggaagctctatgttgggatcatgatcgattcggcaaggattacctgggcgaattcgatatcgcattggaggacatatttgctgatggccaggtggaccaacaggtaggtgaagggacacgttgctcggacaattggggactcgggctgacttgattcatagcctaaatggtatactttgaattccaagcggaaggcgtctaaaaagaaggatagcactgtgtcgggcgagattctgctgcagttctcgctcgccgattctgcgaaccccgctgccacgccggcggaaatattctccaagttcaagaaattggtatactcgggtgatgaggatgaccagaactctcagatccctcccgccgatcttgatgacttggaccgggacgaggatagctccgatgagcctgatgacgcggcaggtggcccagaaggcggcccagaagggggagaaaagcgccggcgacttcgattggctcgcttgagacgcaagtccctggcagctcgtgcataccaattctcaggctcgggcaccggagtgcaaggtatcgttttcatggaaattgttcgcgtgaccgatctgcctcctgaacgaaatggtatgaatcattctcctgcacgcagaacgctagatgctaattgacgttctagtaacgcggacatcgttcgatatggatccttttgtcgtgacctctctaggaaggaaaaccttaagaactcctgtcatccgccataacctgaacccagagtatcatgagaaaatggtgtttcaggtgatgcggcacgaacagtcttataccatcagcttcagtgtgatagatcgagacaagttctccgggaatgactttgtcgcctctgcgggtttttctctgcggaatctcatccagtccggcccagaagcagaccccgagacgggattatatcactttgtagaggacctggaggaacctgatcacactaaaggtaccaagatagctcagcgacctggagttagaccctcgcattcttcgtcaagtctctccaaactggctcggcctataataaagacgcgccactccgcaacatcagtctcaagccaatcaatgctcgaagcgccaacgcccagtctccttacaccttcttccctcccagaagaaggaatttcagagatggatagtactaattcattggcgaccctgaacatgtatgatggcgagtcagccccgattgacgagaacggcttcagatcatatactattccccttatgctcaagaatagagaacggtgggaagacaaacattcgccagagctgcatgtcaagacgaagtatctgccatacagtgctctccgacagcatttctggaggttgatgctcaagcaatatgacgccgacgagagtggtcgcattgacaaggtggagatgacgacaatgcttgacactctcggttcgacgctaaaggagtcgacaattgacagtttcttcaaacgcttcagcgcggacaataagtctaatgaaaacgatgatttgacattcgaccaggcagtcatttgtctcgaggacacgcttcaaaccctgcagaagagaaattcaatggctgctcccagagcgctttcgcttcctctgtcaaacgccggaagccaagatagtgagccatctagcagcgacgagcacactttggaaaccaacaccattgctgctcttaatgccgatccgcacaacacatctattccaaccctgtccaatgaggaacaatccagttccgctgatgagtacctccagcccgatgatctcgcggacgatgggggcgaggagcacgtcgtcgaaattcgcgagtgcccactctgccaccagccacgtcttgggaaacgctctgatgcggatatcatcacgcacattgccacgtgcgcaagtcaggattggcgtcaggttgacaacttagttatgggtggttttgtgacttccagccaggcacagcgcaagtggtactccaaagtcattacaaagatctcatacggcgggtacaaactcggagcgaactcggccaatatccttgtacaagaccggatcaccggtcagataaacgaggaacgcatgagtgtatatgtgcgactcgggatccggctgctatataagggcatcaaaagtcgtgatatggaaaagaagcgaagtacgtaacccttgagctcaagtgtatatgttgacgaaaagatctgtttgctaacaaattctattagttcgccgtgtattgcgctctttgagtgtcaagcagggtcgcaaatacgatgacccagcctcggcatcgcagatcaaggactttatcaatttccaccagctggacatgtccgaagttctgatgcccctagagaacttccgcaatttcaatgaattcttctaccgtgccctcaagcccgatgcccgtccgtgctccgctcccgacgaacctaagattgttgtgtctcccgccgactgtcgctcggtggtatttgatcgcttgagcgatgcaactagcatctgggtcaagggccgtgagttctcgattgaaaggttgttaggcaatgcttacccggacgatgctgctcgataccgaaacggtgctgtcggagtgttccgtctggcacctcaagactaccaccgcttccacatccccgtagatggaataatgggtgaacccaagaccatcgagggcgagtattatacggtgaatcccatggcgatccgatccgccttggatgtatacggcgagaatgtccgcattctcgtccctattgactctgtcgcgcatggccgagtaatggttgtctgcgttggtgccatgatggtcggcagtacggtcatcacccggacagccggcgagaaggtttcacgagctgaagagctgggctacttcaaatttggtggcagcacccttctagtgctctttgaaaatggcaagctcaatttcgacaaggacctagcggaaaactccaagtgtgcactggaaactttggtaagagccgaactgatttatcttttttcatacttgatcaattgcatactaacactcctatcttatagatccgagttggcatgtcggtcggacacagcccggatattcctcagtatgaacctgatatgcccaagcagtcggagaacgtcactgccgaggaaatgcaagaagccaagcgccgcatcgagggcagccttgcaccaagcaagccctccaccctactcaagtcattccaatgatcctataatctgtctttctttttccttggagtggacagggctcaactcccaccgctctttctcactgaacatattgtttttcaacatcggtgtcggggtgttctttgttttccggtgaaaacatcatagcgtttatctagcagcatctgcgcattgcgaggattgggggtagaagaaatcagggtgttgcattttagagccagtcattcattaataacgcttaatatttgggatcatttaggtaaaagcagtagttagagtgatcaaagtagtagagcaacgttgaagtataacggtcgatagtcctaaactagactagcgcggtccccacgcgcccgaccaaaacaaccgcgtgcaagaatccaacccaccactcacaccccaacctgccgctcccttgcgtgtctttttcgcgattgaattgaaaaagtcgcctagtctgctgctccgcagctgcagttctgaattgggacgcgacccgcgcctaacattccgcgagccgactgccccgacctcaattcaaccgtgccacaaccctatacacacattaggtacccattgatcaacaaacggtctgattcggcaagaccgtgtcgagatcgatcagccgtttaggggggttaactcgagtccagcattcatacgcacacgggaatcgcgcttgttgttcctccaggaagcctcttcaaccaggggtatttgactggagaacaggacgtcacgaagcgactagtcgacaccggaacgggggtgtttgctttgccacccctaggtttattcccgagcacaataaccccgcgtgaacccctcctgacatgacagtcgcggtcctggcgaccacaacgaccaagacaaagcgtcgccaaccgctggggacgatttcaatggccggtccgaagacacaatcgcgctctgcaactgcgtacagtggaaccgtgaaggccaaggaacagaggactacgcgactcagcgcaagtaaacaagatctcgagcagagcacaaacaagctagggaagcggccagctggtgagtaatgtgccggggttggaagttgttgagcggtgttgaaagaatatgctaattcatctctagtggcatatgaggaggatgcagaagggttccagttctctctactaccatcaaagaagcccaggccatcaatcgaagcggtcccggaaatgccccattcagacgtggaaaatgcgcctcccaagtccacgccgaaaagaggacgcccacgaaaaaagccaacgggcgacgagaccacttcaagtacggtgccagcaaaggggaaaagcattgagcttccaagtaggagacctacgagaggaactgcgaagactacacacacagaatctgaatctcaaccaacaaacacgattcgcccatcacgaactcgcgacagcccagagcaccagccggaggcaaaaaagccgaaaaaagcaggacgaccaccaaaagccaaaaaacaagtgcaagtgtctgagtcaaatggatataattccccagtgcaaccgccagagggtacaaaggtggcactgccggtggccgatactccggtgattcagcgcaataaagagttcagaggcggaaagggtgataaaaacgataaagggcgacggcgaagcagcttgggtatgcgaggacgaagggccagttttttgatcgactcagggacatcaaatggtaagattctcggtctgcatgggctataaatggtcgaatgctgattttgtctcttttcttgtacagcattaccccatagagaagttggcacagcagatttttacaagcacatcgccgatgacggaatccctgaaccgcgaaggatgcgacaactattgatttggtgtgcgactcgtgcactaggggaaaagccctcaggaggctccaactcggacgatcaaagtgcgcgcttagcaggtacgtggaaccgtttacttacctagagggattttttatctgaccatttctagcgcgtgtgattcaagaggagcttcttcaggatttttcaaacaactcggagctttccaactggcttggtcgcgaagatttgaaccctccagccgtggtggtcaaaaaaccgaacccgcgaaacctgcaaaatacagacaagattaaggaattggaggagcatatacagaagtatgtgtatcaccaagagctgtctcgagtgtatagaactaacgaacttccagattacacaaagaaagacaatctctcaatgcgcttcttcgacagccagcgatcccaaccgttaaggctaaacctcaatctgacgacctacacaaagataagcaagcttcacgtaaatcacaacgcgaagaagtcgacccctctctcctcgatccctcacaacaagccatactagaattccttaatctcccgaatcagccagagggagaatcctctgccccatcctcaatccgaccacctatcacaccatctgccgtctctgctcaattatcacgcatcacatctgggctggcaccgacactcgatgccttcgcagccggtgtacatgacatcgaactataccgtgcctccgcggataccgtttcatcccgaatattacgcatctgtgcacagcgactggaagagcgcgatgcgcagaacacacaacgtcgcctcgcaatagaaggcaacgatgatgaacatccaccaccaacgagaattaaggaagatttgggtctcattctgggagctcttagtcgggtggagagacgatagaaaatactgttcattcgcttttctaggagatttctcctacgtatattcccaataatctgttttccagcgattcggcattcgttttcctttcttccttttttctgttcccttcggggattcaccatgaatgaattgattgatagcgatgatcttgacgaaaccccagcccaacaccatgggatggggaaaggcgcatttacaatggcatttcaattgtttgataagctcagagtttggggtttggatttgcaattctgagatatctgatgctccgcaaagtgcagagattcaagatgaagtgaataggtagtcaggtacctaatacatgccgtcaactaataaaaggctagaattgagatacttattcgatcccatctctacttcactggtcttgatataagttttagttttgagctcatggattctaggcgtcgatcttataggcccaggcgccttccttaacgagcttagtcagggatgctctcgacttgcttcttacagtgacggtgcataagtttggacacctcttcgtcgagattctccaatttcgggcttctcaccttcgcgctctcttccaaatcttcacacgagctctatcacaaactcaaagtccatccgaactggggatatgtcatatatcgcaccacttattcccctgaatctgacgcccacttctccactgcggtcaagtatgtcgaggcctttgtcaagaaatcattctttagggaatgcgcatctaaaaacgagagttcacctagcgtagatcccgccatttacgaggaaatccaggccaaatatagttcaaccgtcatagaagatgcggctctctttgatggtgcctcaattgattcgatacgcgctcattttgaggcatgggtggatgtccagggtcagcgtgattctttcaacaaataccgaatgtgcatagtcattgatgaggaatgtctgcaaacgctgctgggtacatcggcggaggccctagagcaggagactgaatacaagagagacaaaacaaagcgttatgtaaaaatcgagcacgctgcttcacccccggctattgtccttcgatatctagatgacgatcttttagaagcatccaatagccaacgcctcatcgacagacatcaagcccaccaatgtactagtgaactacggaaatggcgaatcctattccgtcatatttcgctaagatacatacaacgacaaagttcagacaaacagttttgttcttcccatctcgatattcatatatgacaccccagatgaaaaactaagaaaataaaaggacaggcacacgcgaaaggagagcctcgatgagtttagtcgtgactcgtgagaatcgtagcttctatatatgtccaaacggagaaggtcgggatagttagtcgatatagacttgatcggcgaggaaaatagagggaaagaaagaccgagatgacgcagcaaagaggctaataatac
